(19) United States
(12) Patent Application Publication
(10) Pub. No.: US 2024/0247228 A1
(43) Pub. Date: Jul. 25, 2024

(54) BIOLOGICALLY CONTAINED BACTERIA AND USES THEREOF

(71) Applicant: NOVOME BIOTECHNOLOGIES, INC., South San Francisco, CA (US)

(72) Inventors: Weston Robert Whitaker, Daly City, CA (US); William Cain DeLoache, Alameda, CA (US); Zachary Nicholas Russ, IV, San Bruno, CA (US); Elizabeth Joy Stanley Shepherd, Redwood City, CA (US); Lauren Popov, Redwood City, CA (US)

(21) Appl. No.: 17/618,130

(22) PCT Filed: Jun. 12, 2020
(86) PCT No.: PCT/US2020/037571

§ 371 Date: Aug. 24, 2022

Related U.S. Application Data
(60) Provisional application No. 62/861,181, filed on Jun. 13, 2019.

(51) Int. Cl. C12N 1/20; A61K 35/74; C07K 14/195; C12N 1/38; C12N 15/74

(52) U.S. Cl. CPC C12N 1/20; A61K 35/74; C07K 14/195; C12N 1/38; C12N 15/74

(57) ABSTRACT

The present disclosure provides biocontainment methods and mechanisms that prevent modified cells from escaping their intended environment(s) while enabling the survival and replication of the modified cells where intended. This is achieved by linking the viability of the modified cells to the presence of a control molecule that is exogenously supplied to define the location and time in which cells are capable of growing.

### CROSS REFERENCE TO RELATED APPLICATIONS

[0001] This application is a § 371 National Stage of International (PCT) Patent Application Serial No. PCT/US2020/037571, filed on Jun. 12, 2020, which claims the benefit of, and priority to, U.S. Provisional Patent Application No. 62/861,181, filed on Jun. 13, 2019, the disclosures of each of which are hereby incorporated by reference in their entirety for all purposes.

### GOVERNMENT RIGHTS

[0002] This invention was made with Government support under contract 1831185 awarded by the National Science Foundation. The Government has certain rights in the invention.

### SEQUENCE LISTING

[0003] This application contains a Sequence Listing that has been submitted in ASCII format via EFS-Web and is hereby incorporated by reference in its entirety. The ASCII copy, “NVM-003WOUS_SL.txt,” was created on Jul. 22, 2022 and is 832,196 bytes in size.

### BACKGROUND

[0004] Cell-based therapeutics are an emerging approach to complement the traditional small molecule and protein-based therapies in diseases where spatial and temporal specificity, logic and new activities are needed, but can only be developed by engineering whole cells. A challenge unique to cell-based therapeutics is controlling the replication of the therapeutic cells in a manner that does not interfere with the therapeutic function but can limit survival to a defined time and space. Biocontainment is a necessary feature of a genetically modified cellular therapeutic, whereby the therapeutic cell is modified to not be capable of reproducing outside of an intended location and/or duration. Therapeutics that persist beyond the intended treatment period or escape into the environment or other people represent a risk that must be addressed.

[0005] Introduced mutations that confer a fitness disadvantage, such as an auxotrophy that can only be complemented in the laboratory, offer an effective means of biocontainment. However, for many applications it will be necessary for the cellular therapeutics to be viable in patients, for instance to outcompete pathogenic microbes or to reach the abundance needed for efficacy. To enable controllable growth of cells in vivo, numerous strategies have been devised that make viability dependent on the presence of an easily controllable environmental signal, typically a small molecule. However, most biocontainment methods published to date make use of toxins which are induced as the means of killing cells in the presence of a control molecule. There are two disadvantages to this approach. First, the default state for these biocontained cells is to be alive, meaning that any cells that are not actively exposed to the control molecule when clearance is required will continue to persist. Complete clearance from a patient would require 100% of the therapeutic cells to come in contact with the appropriate concentration of control molecule, which is difficult to achieve in practice. This is particularly problematic in the context of a bacterial therapeutic, where rates of shedding are high and transmission from person-to-person is possible.

[0006] A second disadvantage to toxin-dependent biocontainment methods is the high frequency at which cells can escape, since any mutation that disables the toxin gene (e.g. nonsense mutations, transposon insertions, etc.) will break the biocontainment strategy. To reduce the escape rate, multiple copies of toxins can be encoded, thereby requiring multiple mutations for escape, which will be less frequent than a single mutation. Although this redundancy does successfully reduce the escape rate (Cai et al., (2015) PROC. NATL. ACAD. SCI. U. S. A. 112, 1803-1808; Chan et al., (2015) NAT. CHEM. BIOL. 12, 82-86; Gallagher et al., (2015) NUCLEIC ACIDS RES. 43, 1945-1954), mobile genetic elements are common in non-model organisms and, once induced to replicate, are capable of inserting into multiple locations with a high frequency. Any strategy in which loss-of-function mutations will break biocontainment, which includes all strategies that rely on toxins, suffers from this fundamental limitation.

[0007] As an alternative to using toxins, others have described strategies for linking a control molecule's presence to the expression of an essential gene, wherein in the absence of the control molecule, the essential gene is not produced, and the cells are no longer viable. This strategy avoids concerns over strain shedding, since the default state of the cells is death, and they must be actively supplied with the control molecule to remain alive.

[0008] Additionally, in contrast to toxins, mutations to the essential gene that render it non-functional will result in a loss of viability instead of escape from biocontainment. However, for many inducible viability strategies described to date, biocontainment is dependent on transcriptional repressors that block expression in the absence of the control molecule. Like the toxin-based strategies, repressor-based biocontainment can be easily subverted with a loss of function mutation that prevents the repressor from functioning and thus produces constitutive expression of the essential genes.

[0009] Accordingly, there is a need in the art for new biocontainment strategies that reduce or eliminate escape frequency.

### SUMMARY

[0010] The disclosure relates in part to the use of activators to activate essential gene expression for biocontainment of recombinant bacteria. In contrast to repressors, which, as discussed above, can be easily subverted with a loss of function mutation that prevents the repressor from functioning and thus produces constitutive expression of the essential gene, the most common mutations to an activator will result in no essential gene expression under any conditions, and thus will be less prone to escape.

[0011] One challenge, however, with the use of activators for biocontainment is that unlike repressors, in which including additional copies of the repressor offers some reduction in escape frequency, escape mutants for activators are dominant (only one of the copies would need to mutate to be constitutively active to subvert biocontainment). Therefore, providing additional copies of an activator provides no reduction in escape rate.

[0012] Disclosed herein are methods and compositions for biocontainment that take advantage of the rare rate of subverting activator-based biocontainment yet avoid the problems of dominant activator mutations that reduce the effectiveness of redundancy by redirecting small molecule sensing two component systems (TCSs) to control the expression of essential genes. Therapeutic strains of gut bacteria engineered in this way are capable of reproducing in the gut when patients ingest a control molecule sensed by the TCS but fail to reproduce in the patient when the control molecule is not ingested or in other environments lacking the control molecule. The disclosure provides compositions and methods for implementing this strategy in any organism and includes multiple working examples implementing porphyran dependent biocontainment in species of gut bacteria from the Bacteroides genus.

[0013] In one aspect, the disclosure relates to a genetically modified bacterium that includes a first activator that is activated by a control molecule, a first promoter that is activated by the first activator; and a first essential gene that is operably linked to the first promoter. In certain embodiments, the bacterium can include a second activator that is activated by the control molecule, a second promoter that is activated by the second activator, and a second essential gene that is operably linked to the second promoter. In certain embodiments, the first promoter is not activated by the second activator and the second promoter is not activated by the first activator.

[0014] In certain embodiments, the bacterium further comprises a third activator that is activated by the control molecule, a third promoter that is activated by the third activator, and a third essential gene that is operably linked to the third promoter. In certain embodiments, the third promoter is not activated by the first or second activator and the first or second promoter is not activated by the third activator.

[0015] In certain embodiments, the expression of the first, second, and/or third essential gene is dependent upon the presence of the control molecule. In certain embodiments, the growth and/or viability of the bacterium is dependent upon the presence of the control molecule. In certain embodiments, the control molecule is not regularly present in the human diet. In certain embodiments, the control molecule is a monosaccharide or a polysaccharide, for example, a marine polysaccharide or an antibiotic, or a derivative of any of the foregoing. In certain embodiments, the marine polysaccharide is porphyran or agarose, or a derivative of either of the foregoing. In certain embodiments, the antibiotic is anhydrotetracycline or derivative thereof.

[0016] In certain embodiments, the first, second, and/or third activator is a two-component system (TCS) protein comprising a sensor domain and a regulatory domain. In certain embodiments, the first, second, and/or third activator is a hybrid two-component system (HTCS) protein comprising a sensor domain and a regulatory domain.

[0017] In certain embodiments, the HTCS protein is a naturally occurring HTCS protein, or a functional fragment or variant thereof. For example, the naturally occurring HTCS protein can be a bacterial HTCS protein, such as a Bacteroides (e.g., Bacteroides ovatus, Bacteroides dorei, Bacteroides nordii, Bacteroides salyersiae, or Bacteroides uniformis) HTCS protein.

[0018] In certain embodiments, the HTCS protein is a chimeric HTCS protein, wherein the sensor domain is a sensor domain from a first naturally-occurring HTCS protein, or a functional fragment or variant thereof, and the regulatory domain is a regulatory domain from a second naturally-occurring HTCS protein, or a functional fragment or variant thereof.

[0019] In certain embodiments, the HTCS protein comprises an amino acid sequence having at least 80% identity to any one of SEQ ID NOs: 19, 23, 25, 38, 39, 42, 43, 51, 52, 53, 54, 59, or 64-71, or a functional fragment or variant thereof.

[0020] In certain embodiments, the bacterium comprises one or more transgenes encoding the first, second, and/or third activator.

[0021] In certain embodiments, the first, second, and/or third promoter comprises a nucleotide sequence having at least 80% identity to any one of SEQ ID NOs: 1, 2, 7, 8, 9, 10, 11, 12, 13, 45, 46, 62, 63, or 73, or a functional fragment or variant thereof, e.g., SEQ ID NO: 44.

[0022] In certain embodiments, the essential gene is selected from thymidylate synthase (Thy A), arginyl-tRNA synthetase (argS), cysteinyl-tRNA synthetase (cysS), penicillin tolerance protein (lytB) and peptide chain release factor (RF-2).

[0023] In certain embodiments, the first, second, and/or third activator and/or promoter is heterologous to the bacterium. In certain embodiments, the first, second, and/or third gene is not operably linked to the first, second, and/or third promoter, respectively, in a similar or otherwise identical bacterium that has not been modified.

[0024] In certain embodiments, culturing of the bacterium results in a bacterium that is capable of growth and/or viability in the absence of the control molecule at a frequency of less than 10⁻⁵, 10⁻⁶, 10⁻⁷, 10⁻⁸, or 10⁻⁹. In certain embodiments, following culture of the bacterium with the control molecule and subsequent removal of the control molecule from the culture, the half-life of the bacteria in the culture is less than a day. In certain embodiments, following administration of the bacterium and control molecule to a subject, the amount of bacteria in the subject decreases 10 fold within 2 days of removal or discontinuation of the control molecule from the subject.

[0025] In certain embodiments, the control molecule is a porphyran and the first and second activator are each an TCS or HTCS protein, and (i) the porphyran, when present, activates the first and second TCS or HTCS proteins, (ii) the first and second TCS or HTCS proteins, when activated, activate the first and second promoters, respectively, and (iii) the first and second promoters, when activated, direct expression of the first and second essential genes, respectively, thereby resulting in the growth and/or viability of the bacterium being dependent upon the presence of the porphyran. In certain embodiments, the bacterium is a commensal bacterium.

[0026] In certain embodiments, the bacterium further comprises one or more transgenes encoding a protein homologous to a starch binding protein such as SusC or SusD, e.g., SEQ ID NO: 20 or 21. In certain embodiments, the bacterium comprises one or more transgenes that increase its ability to utilize a privileged nutrient as carbon source, for example, a marine polysaccharide such as porphyran.

[0027] In certain embodiments, the bacterium further comprises one or more therapeutic transgenes. In certain embodiments, the therapeutic transgene is operably linked to a promoter, such as a non-native promoter (e.g., a phage-derived promoter). In certain embodiments, the promoter comprises the consensus sequence GTTAA(n)₄₋₇GTTAA(n)₃₄₋₃₈TA(n)₂TTTG. In certain embodiments, the promoter comprises SEQ ID NO: 48, SEQ ID NO: 49, or SEQ ID NO: 50. In certain embodiments, any of the transgenes are on a plasmid, on a bacterial artificial chromosome, and/or are genomically integrated.

[0028] In another aspect, the disclosure relates to a pharmaceutical composition comprising a bacterium as disclosed herein and a pharmaceutically acceptable excipient. In certain embodiments, the composition is formulated as a capsule, e.g., an enteric coated capsule, or a tablet. In certain embodiments, the composition further comprises the control molecule.

[0029] In another aspect, the disclosure relates to a method for reducing the growth and/or viability of a bacterium (e.g., a commensal bacterium) in the absence of a control molecule. The method includes genetically modifying the bacterium to comprise a first activator that is activated by the control molecule, a first promoter that is activated by the first activator, and a first essential gene that is operably linked to the first promoter. In certain embodiments, the method further includes genetically modifying the bacterium to comprise a second activator that is activated by the control molecule, a second promoter that is activated by the second activator, and a second essential gene that is operably linked to the second promoter.

[0030] In certain embodiments, the method further includes genetically modifying the bacterium to comprise a third activator that is activated by the control molecule, a third promoter that is activated by the third activator, and a third essential gene that is operably linked to the third promoter.

[0031] In another aspect, the disclosure relates to a protein (e.g., an isolated protein) comprising the amino acid sequence of any one of SEQ ID NOs: 39, 43, 53, 54, 59, or 64-71, or a functional fragment or variant thereof, or an amino acid sequence having at least 80%, at least 85%, at least 90%, at least 91%, at least 92%, at least 93%, at least 94%, at least 95%, at least 96%, at least 97%, at least 98%, or at least 99% identity to any one of SEQ ID NOs: 39, 43, 53, 54, 59, or 64-71, or a functional fragment or variant thereof. In additional aspects, the disclosure relates to a nucleic acid (e.g., an isolated nucleic acid) comprising a nucleotide sequence encoding the protein, an expression vector comprising the nucleic acid, a host cell (e.g., a bacterium) comprising the expression vector, and a pharmaceutical composition comprising the protein, nucleic acid, expression vector, or host cell.

[0032] In another aspect, the disclosure relates to a nucleic acid (e.g., an isolated nucleic acid) comprising the nucleotide sequence any one of SEQ ID NOs: 29, 30, 31, 34, 35, 36, 37, 40, 55, 56, 60, 61, or 72, or a functional fragment or variant thereof, or a nucleotide sequence having at least 80%, at least 85%, at least 90%, at least 91%, at least 92%, at least 93%, at least 94%, at least 95%, at least 96%, at least 97%, at least 98%, or at least 99% identity to any one of SEQ ID NOs: 29, 30, 31, 34, 35, 36, 37, 40, 55, 56, 60, 61, or 72, or a functional fragment or variant thereof. In additional aspects, the disclosure relates to an expression vector comprising the nucleic acid, a host cell (e.g., a bacterium) comprising the expression vector, and a pharmaceutical composition comprising the protein, nucleic acid, expression vector, or host cell.

[0033] In another aspect, the disclosure relates to a genetically modified bacterium that includes (i) an HTCS that is activated by porphyran comprising the amino acid of SEQ ID NO: 19, or a functional fragment or variant thereof, or an amino acid sequence having at least 80%, at least 85%, at least 90%, at least 91%, at least 92%, at least 93%, at least 94%, at least 95%, at least 96%, at least 97%, at least 98%, or at least 99% identity to SEQ ID NO: 19, or a functional fragment or variant thereof; (ii) a promoter that is activated by the HTCS comprising the nucleotide sequence of SEQ ID NO: 73, or a functional fragment or variant thereof, or a nucleotide sequence having at least 80%, at least 85%, at least 90%, at least 91%, at least 92%, at least 93%, at least 94%, at least 95%, at least 96%, at least 97%, at least 98%, or at least 99% identity to SEQ ID NO: 73, or a functional fragment or variant thereof; and (iii) an essential gene (e.g., an argS gene) that is operably linked to the promoter. In certain embodiments, the essential gene (e.g., the argS gene) is operably linked to a ribosome binding site (RBS) comprising the nucleotide sequence of SEQ ID NO: 47, or a functional fragment or variant thereof, or a nucleotide sequence having at least 80%, at least 85%, at least 90%, at least 91%, at least 92%, at least 93%, at least 94%, at least 95%, at least 96%, at least 97%, at least 98%, or at least 99% identity to SEQ ID NO: 47, or a functional fragment or variant thereof.

[0034] In another aspect, the disclosure relates to a genetically modified bacterium that includes (i) an HTCS that is activated by porphyran comprising the amino acid of SEQ ID NO: 59, or a functional fragment or variant thereof, or an amino acid sequence having at least 80%, at least 85%, at least 90%, at least 91%, at least 92%, at least 93%, at least 94%, at least 95%, at least 96%, at least 97%, at least 98%, or at least 99% identity to SEQ ID NO: 59, or a functional fragment or variant thereof; (ii) a promoter that is activated by the HTCS comprising the nucleotide sequence of SEQ ID NO: 45, or a functional fragment or variant thereof, or a nucleotide sequence having at least 80%, at least 85%, at least 90%, at least 91%, at least 92%, at least 93%, at least 94%, at least 95%, at least 96%, at least 97%, at least 98%, or at least 99% identity to SEQ ID NO: 45, or a functional fragment or variant thereof; and (iii) an essential gene (e.g., a lytB gene) that is operably linked to the promoter. In certain embodiments, the essential gene (e.g., the lytB gene) is operably linked to a ribosome binding site (RBS) comprising the nucleotide sequence of SEQ ID NO: 84, or a functional fragment or variant thereof, or a nucleotide sequence having at least 80%, at least 85%, at least 90%, at least 91%, at least 92%, at least 93%, at least 94%, at least 95%, at least 96%, at least 97%, at least 98%, or at least 99% identity to SEQ ID NO: 84, or a functional fragment or variant thereof.

[0035] In another aspect, the disclosure relates to a genetically modified bacterium that includes (i) a first HTCS that is activated by porphyran comprising the amino acid of SEQ ID NO: 19, or a functional fragment or variant thereof, or an amino acid sequence having at least 80%, at least 85%, at least 90%, at least 91%, at least 92%, at least 93%, at least 94%, at least 95%, at least 96%, at least 97%, at least 98%, or at least 99% identity to SEQ ID NO: 19, or a functional fragment or variant thereof; (ii) a first promoter that is activated by the first HTCS comprising the nucleotide sequence of SEQ ID NO: 73, or a functional fragment or variant thereof, or a nucleotide sequence having at least 80%, at least 85%, at least 90%, at least 91%, at least 92%, at least 93%, at least 94%, at least 95%, at least 96%, at least 97%, at least 98%, or at least 99% identity to SEQ ID NO: 73, or a functional fragment or variant thereof; (iii) a first essential gene (e.g., an argS gene) that is operably linked to the first promoter; (iv) a second HTCS that is activated by porphyran comprising the amino acid of SEQ ID NO: 59, or a functional fragment or variant thereof, or an amino acid sequence having at least 80%, at least 85%, at least 90%, at least 91%, at least 92%, at least 93%, at least 94%, at least 95%, at least 96%, at least 97%, at least 98%, or at least 99% identity to SEQ ID NO: 59, or a functional fragment or variant thereof; (v) a second promoter that is activated by the second HTCS comprising the nucleotide sequence of SEQ ID NO: 45, or a functional fragment or variant thereof, or a nucleotide sequence having at least 80%, at least 85%, at least 90%, at least 91%, at least 92%, at least 93%, at least 94%, at least 95%, at least 96%, at least 97%, at least 98%, or at least 99% identity to SEQ ID NO: 45, or a functional fragment or variant thereof; and (vi) a second essential gene (e.g., a lytB gene) that is operably linked to the second promoter. In certain embodiments, the first essential gene (e.g., the argS gene) is operably linked to a first ribosome binding site (RBS) comprising the nucleotide sequence of SEQ ID NO: 47, or a functional fragment or variant thereof, or a nucleotide sequence having at least 80%, at least 85%, at least 90%, at least 91%, at least 92%, at least 93%, at least 94%, at least 95%, at least 96%, at least 97%, at least 98%, or at least 99% identity to SEQ ID NO: 47, or a functional fragment or variant thereof. In certain embodiments, the second essential gene (e.g., the lytB gene) is operably linked to a second ribosome binding site (RBS) comprising the nucleotide sequence of SEQ ID NO: 84, or a functional fragment or variant thereof, or a nucleotide sequence having at least 80%, at least 85%, at least 90%, at least 91%, at least 92%, at least 93%, at least 94%, at least 95%, at least 96%, at least 97%, at least 98%, or at least 99% identity to SEQ ID NO: 84, or a functional fragment or variant thereof.

[0036] In another aspect, the disclosure relates to a method of colonizing the gut of a subject, the method comprising administering a bacterium or a pharmaceutical composition as described herein.

[0037] In another aspect, the disclosure relates to a method of treating a disease or disorder in a subject in need thereof, the method comprising administering a bacterium or a pharmaceutical composition as described herein to the subject. In certain embodiments, the method further includes administrating the control molecule to the subject. In certain embodiments, the control molecule is administered to the subject prior to, at the same time as, or after the bacterium. In certain embodiments, the bacterium or pharmaceutical composition is administered to the subject every 12 hours, 24 hours, day, 2 days, 3 days, 4 days, 5 days, 6 days, 7 days, week, 2 weeks, 3 weeks, 4 weeks, month, 2 months, 3 months, 4 months, 5 months, or 6 months. In certain embodiments, the time between consecutive administrations of the bacterium or pharmaceutical composition to the subject is about 1 day.

[0038] In certain embodiments, the subject is an animal, e.g., a human.

[0039] These and other aspects and features of the disclosure are described in the following detailed description and claims.

### DESCRIPTION OF THE DRAWINGS

[0040] The disclosure can be more completely understood with reference to the following drawings.

[0041] FIG. 1 shows comparisons of various biocontainment strategies, and the most likely mode of failure in which mutations subvert biocontainment.

[0042] FIG. 2 shows comparisons of redundancy implemented in various biocontainment strategies, and the most likely mode of failure in which mutations subvert biocontainment.

[0043] FIG. 3 depicts a series of bar graphs demonstrating identification of suitable control molecule promoter elements. FIG. 3A shows luciferase reporter induction of candidate porphyran-responsive promoters (SEQ ID NO: 1-10) in wildtype NB001 Bacteroides. Luminescence was measured and normalized by OD₆₀₀ₙₘ in the absence or presence of porphyran. FIG. 3B shows luciferase reporter induction of candidate agarose-responsive promoters (SEQ ID NO: 11, 12) in wildtype NB003. Luminescence was measured and normalized by OD₆₀₀ₙₘ in the absence or presence of agarose. FIG. 3C shows luciferase reporter induction of a putative tetracycline-responsive promoter (SEQ ID NO: 13) in wildtype NB004. Luminescence was measured and normalized by OD₆₀₀ₙₘ in the absence or presence of anhydrotetracycline.

[0044] FIG. 4 shows characterization of porphyran-inducible promoter P_por10. FIG. 4A depicts the plasmid map of a P_por10-driven luciferase construct (SEQ ID NO: 26). FIG. 4B depicts luminescence measured, normalized by OD₆₀₀ₙₘ, of wildtype NB001 transformed with the P_por10-driven luciferase plasmid grown in varying concentrations of porphyran.

[0045] FIG. 5 depicts a bar graph demonstrating that porphyran-inducible HTCS alone is not sufficient for porphyran-response. The P_por10-driven luciferase element was stimulated in NB004 containing the full porphyran polysaccharide utilization locus (PUL) or in NB004 containing only the hybrid two-component system (HTCS) of the porphyran PUL. Luminescence was measured and normalized by OD₆₀₀ₙₘ in the absence or presence of porphyran.

[0046] FIG. 6 depicts an in vitro growth assay showing porphyran-inducible regulation of essential gene thy A and porphyran-dependent biocontainment. FIG. 6A shows luminescence, normalized by OD₆₀₀ₙₘ, of P_por10-driven thy A-luciferase coupled to the degenerate RBS library (SEQ ID NO: 30) in media supplemented with porphyran. Each point is a clonal library member. FIG. 6B depicts the plasmid map of the P_por10-driven thy A expression construct (SEQ ID NO: 31). FIG. 6C shows the growth curves of wildtype (“wt”) strain NB001, thy A knockout (“KO”) strain NB023, and biocontained (“BC”) strain NB024. Strains were grown in standard BHIS media, media supplemented with thymidine, or media supplemented with porphyran. FIG. 6D shows the growth curves of biocontained strain NB024 in BHIS supplemented with 0.0% porphyran, 0.002% porphyran, 0.02% porphyran, or 0.2% porphyran.

[0047] FIG. 7 shows the plasmid map (corresponding to SEQ ID NO: 32) used for essential gene promoter replacement with the porphyran-inducible promoter.

[0048] FIG. 8 depicts growth curves demonstrating porphyran-inducible regulation of multiple essential genes. FIG. 8A depicts growth curves of wildtype strain NB075 carrying a porphyran PUL in porphyran free BHIS media and in media containing 0.2% porphyran. FIG. 8B depicts growth curves of thy A-deletion strain sWW090 carrying the porphyran-driven thyA gene in porphyran free media and in media containing 0.2% porphyran. FIG. 8C depicts growth curves of the strain sWW180 carrying the porphyran-driven argS gene in porphyran free media and in media containing 0.2% porphyran. FIG. 8D depicts growth curves of the strain sWW202 carrying the porphyran-driven cysS gene in porphyran free media and in media containing 0.2% porphyran. FIG. 8E depicts the growth of lytB-deletion strain sWW090 carrying the porphyran-driven lytB gene in porphyran free media and in media containing 0.2% porphyran. FIG. 8F depicts the growth of RF-2-deletion strain sWW206 carrying the porphyran-driven RF-2 gene in porphyran free media and in media containing 0.2% porphyran.

[0049] FIG. 9 depicts an in vitro chemostat growth assay comparing growth of a wildtype and a porphyran-dependent biocontained strain. BHIS media containing 0.5% porphyran was diluted out by replacing half the media with porphyran free BHIS every 8.7 hours. Colony Forming Units (CFUs) are monitored for wildtype strain sZR0103 (grey line) and biocontained strain sZR0250 (black line), and escapes of the biocontained strain that are capable of growing without porphyran (dashed black line).

[0050] FIG. 10 depicts line graphs demonstrating elimination of a wildtype and a porphyran-dependent strain from the gut of Sprague-Dawley rats following porphyran-withdrawal. Rats were gavaged on Day 0 with 10⁹ CFU of wildtype strain sWW808 containing only a porphyran-PUL, or porphyran-biocontained strain sWW805 and fed a diet supplemented with porphyran. After 3 days, half the rats from each group were switched to a diet lacking porphyran, while the other half remained on the porphyran-containing diet. CFU plating of the feces was used to determine eliminated strain abundance. FIG. 10A depicts the results of the in vivo experiment for wildtype strain sWW808. FIG. 10B depicts the results of the in vivo experiment for biocontained strain sWW805 and demonstrates rapid clearance of the biocontained strain following porphyran withdrawal. Shaded regions represent 95% confidence intervals.

[0051] FIG. 11 shows the plasmid map of the construct utilized for essential gene promoter replacement with the anhydrotetracycline-inducible promoter (SEQ ID NO: 37).

[0052] FIG. 12 depicts an in vitro growth assay comparing biocontainment of a wildtype, 1× biocontained porphyran-dependent strain, and 2× biocontained porphyran- and anhydrotetracycline-dependent strain. Wildtype strain NB075, porphyran-controlled cysS biocontained strain sWW202, and porphyran-controlled cysS/aTc-controlled argS double-biocontained strain sCG037 were monitored for growth in vitro. Strains were grown in rich media, media containing only porphyran, media containing only aTc, or media containing both porphyran and aTc. Both biocontained stains required nutrient supplementation in order to grow, but escape colonies were not observed in the absence of aTc and porphyran in only the 2× biocontained strain.

[0053] FIG. 13 depicts an in vitro growth assay performed in a chemostat comparing biocontainment of a wildtype and 2× biocontained porphyran- and anhydrotetracycline-dependent strain. Porphyran and aTc were removed from the media at day 1 through replacing 2.16 volumes of flask media with BHIS-only per day. At day 7, porphyran and aTc were reintroduced into the media to assess if viable cells were present, but no growth was detected.

[0054] FIG. 14 depicts the generation of chimeric HTCSs which can be used, for example, for double-biocontainment using a single control molecule. FIG. 14A depicts a schematic demonstrating the use of a chimeric HTCS to regulate multiple promoters with a single control molecule. FIG. 14B shows a plasmid map of construct pWW1267 utilized for expression of a chimeric HTCS with a porphyran-sensing domain from the NB001 porphyran-responsive HTCS and a regulatory domain from a Bacteroides nordiiHTCS (SEQ ID NO: 39). FIG. 14C is a bar graph depicting promoter-driven expression of luciferase in strain NB075 or NB075 transformed with a construct expressing one of three chimeric HTCS: HTCS-17106 (pWW1266), HTCS-10809 (pWW1265), or HTCS-17150) (pWW1267). Activity in the absence or presence of 0.2% porphyran in the media is shown with the light grey and black bars, respectively. Approximate fold change in activity in response to porphyran presence is shown above the bars for each chimeric HTCS.

[0055] FIG. 15 depicts the generation of an improved mutant chimeric HTCS for use in biocontainment. FIG. 15A depicts a schematic of an assay for measuring the activity of chimeric HTCSs, where luciferase is driven by a chimeric HTCS-associated promoter (SEQ ID NO: 45). FIG. 15B shows the resulting luciferase values for strains expressing mutant chimeric HTCSs when grown in the absence (x-axis) or presence (y-axis) of porphyran. Each dot represents a strain including a unique mutant, squares represent strains including replicates of the initially designed chimeric HTCS, and the triangle represents strain pWW1333 including an improved mutant chimeric HTCS. FIG. 15C further shows promoter activity in the presence of no HTCS (left), the initially designed chimeric HTCS (pWW1267; middle) and an improved mutant chimeric HTCS (pWW1333; right) in the absence (grey) or presence (black) of porphyran, as assessed by luminescence from the reporter plasmid (SEQ ID NO: 41).

[0056] FIG. 16 demonstrates that a wildtype porphyran-responsive HTCS (“WT HTCS”) and a chimeric HTCS (HTCS-17150v2, “chimeric HTCS”) each activate their associated promoters without crosstalk to the other promoter. Strains that were tested are identified on the X axis, and beneath each strain identifier is a schematic of the HTCS that is expressed in that strain, and the promoter used to drive luciferase expression in that strain. Grey and black bars represent luminescence in the absence or presence of porphyran.

[0057] FIG. 17 demonstrates growth, as shown by OD₆₀₀ₙₘ growth curves over time, in the presence (black lines) or absence (grey lines) of porphyran of strains that are non-biocontained (sWW180; upper left), biocontained with only a wildtype porphyran HTCS (NB075; upper right), biocontained with only a chimeric HTCS (sWW939; lower left), or double biocontained with a wildtype porphyran HTCS and a chimeric HTCS controlling different essential genes (sWW942; lower right). Shaded regions represents the 95% confidence intervals for each group (n=3).

[0058] FIG. 18 depicts the abundance of strains as measured by colony forming units (CFU) with single (sWW180; solid black line), double (sWW942; dashed black line), or no (NB075; solid grey line) biocontainment in a 100 ml chemostat of BHIS that initially contained 0.2% porphyran that was diluted out with fresh BHIS lacking porphyran. The limit of detection is indicated with a grey dashed line.

[0059] FIG. 19 demonstrates the abundance of a porphyran consuming, non-biocontained strain (NB144; left) and a biocontained strain (sZR0323; right), in mice harboring one of four different human microbiotas (donors A-D). Mice were gavaged with strains once, on day 1, and fed a diet containing porphyran for the first 4 weeks (solid lines) and then switched to a diet lacking porphyran (dashed lines). Shaded regions represents the 95% confidence intervals for each group (n=2).

### DETAILED DESCRIPTION

[0060] The present disclosure provides biocontainment methods and mechanisms that prevent modified cells from escaping their intended environment(s) while enabling the survival and replication of the modified cells where intended. This is achieved by linking the viability of the modified cells to the presence of a control molecule that is exogenously supplied to define the location and time in which cells are capable of growing. While the preferred embodiments of the present invention described herein enable controllable growth of modified bacterial cells in the gut, it will be obvious to those skilled in the art that such embodiments are provided by way of example only. Other embodiments could utilize different cell types (e.g. mammalian or yeast cells) or be tailored to different environments (e.g. the mouth, the skin, the soil, or industrial fermenters) without departing from the invention. In some cases, the biocontainment is spatial. In some cases, the biocontainment is positional. In some examples the biocontainment is temporal.

[0061] Alternative strategies for achieving control molecule dependent viability for biocontainment have been proposed previously and demonstrated in the laboratory, however none have been shown to be effective in vivo due to limitations related to high rates of strain escape, reliance on a control molecule not suitable for use in vivo, or severe decreases in fitness while implementing biocontainment that prevent colonization in even permissive conditions. FIG. 1 shows comparisons of various biocontainment strategies, and the most likely mode of failure in which mutations subvert biocontainment (right). Toxins and repressors can be disabled by common loss-of-function mutations. Activators can also be mutated to constitutively express a gene even in the absence of the control molecule, but this gain of function mutation is far less common.

[0062] Escape from biocontainment that is based on activator driven expression of an essential gene requires a rare gain-of-function mutation that enables constitutive expression of the essential gene in the absence of the control molecule. One example of how this could be accomplished would be a mutation that renders the activator constitutively active. Though the reduced frequency of such a mutation is advantageous, when multiple essential genes are driven with the same control molecule as a means of adding redundancy, only one copy of the activator must be mutated in order to serve as a dominant mutation and activate all essential genes, thus reducing the ability to use redundancy to decrease the escape rate. FIG. 2 shows comparisons of redundancy implemented in various biocontainment strategies, and the most likely mode of failure in which mutations subvert biocontainment (right). Unlike repressors, mutations to subvert activators are likely to be dominant (middle row), and thus require orthogonal versions (bottom) to effectively add redundancy.

[0063] Accordingly, the disclosure relates, in part, to the discovery of biocontainment strategies using multiple activators that respond to the same molecule but target different promoters, such that a mutation rendering one activator constitutively active will not impact the other promoters. Identifying naturally-occurring activators of this type is extremely difficult, if not impossible. Accordingly, described herein are engineered two-component systems (TCSs) or hybrid two-component systems (HTCSs), which are usually activators (as opposed to repressors) and can be used to drive essential gene expression as a means of biocontainment. TCSs and HTCSs respond to many small molecules suitable for biocontainment in therapeutic or industrial applications. Such molecules include, but are not limited to, carbohydrates, metal ions, amino acids, phosphate, nitrate, pH, osmolarity, membrane stress and antibiotics.

[0064] The modular nature of TCSs and HTCSs allows for the engineering of multiple orthogonal versions that respond to the same molecule but activate different promoters. Canonical TCSs are composed of a sensor histidine kinase (HK), which responds to stimuli and activates a response regulator (RR), via a histidine-to-aspartic-acid phosphotransfer. When phosphorylated, the RR will activate or repress specific target promoters. HTCSs similarly regulate target promoters in a stimulus-dependent manner, but typically contain the sensor and DNA-binding regulatory domains on the same polypeptide. Most bacteria contain tens of TCSs or HTCSs that have low sequence identity, yet retain a high degree of structural similarity, with separate modular domains responsible for each signal transduction event. Due to this structural similarity, it is possible to generate a chimeric TCS or HTCS that redirects signal transduction from the sensor of one TCS or HTCS to the promoter of another.

[0065] Rewiring of signal transduction has been demonstrated in several academic publications (Lynch and Sonnenburg (2012) MOL. MICROBIOL. 85:478-491; Skerker et al., (2008) CELL 133: 1043-1054; Utsumi et al., (1989) SCIENCE 245:1246-1249; Whitaker et al., (2012) PROC. NATL. ACAD. SCI. U. S. A. 109:18090-18095), but the ability to engineer two orthogonal regulators that are induced simultaneously by the same molecule has not been shown. By engineering chimeric TCSs or HTCSs, multiple activators can respond to the same control molecule but not express the essential genes controlled by the other activators, preventing escape in the event that a mutation renders one TCS constitutively active. This approach provides a robust biocontainment system that can be implemented much more easily than existing options for redundant biocontainment, which necessitate widespread genome modifications that reduce organism fitness (Mandell et al., (2015) NATURE 518:55-60; Rovner et al., (2015) NATURE 518:89-93) or impose limitations on molecule choice (Lopez and Anderson, (2015) ACS SYNTH. BIOL. 4:1279-1286).

### I. Definitions

[0066] The term “heterologous” refers to genetic material that has been introduced to a cell wherein the genetic material is either not naturally present in the cell or is naturally present but with an altered sequence or genetic context compared to the introduced genetic material. The term “recombinant microorganism” refers to an organism which has been genetically modified to alter or remove native genetic material or to add heterologous genetic material. We refer primarily to bacterial cells, but it will be obvious to those skilled in the art that such embodiments are provided by way of example only. Other embodiments could utilize different cell types (e.g. mammalian or yeast cells) without departing from the invention.

[0067] The term “viability” refers to the potential for an organism to reproduce under certain environmental conditions. Cells that are viable in a given environmental condition are capable of reproducing in that environmental condition. Cells that are non-viable in a given environmental condition on are not capable of reproducing in that environmental condition.

[0068] The terms “biocontainment” or “biological containment” refer to a method of ensuring that the viability of an organism is restricted to a defined location and time.

[0069] The term “control molecule” refers to a molecule, typically referring to but not limited to an organic compound weighing less than 1500 Daltons, which can be used to control the viability of a biocontained recombinant microorganism.

[0070] The term “activator” refers to a gene, gene product, protein, or a portion thereof which increases the expression of a gene that it regulates under conditions of activation. When an activator is not functionally expressed (e.g. in the event of a loss-of-function mutation), the expression of the regulated gene is low, even under conditions of activation.

[0071] The term “repressor” refers to a gene, gene product, protein, or a portion thereof which reduces the expression of a gene that it regulates under conditions of repression. When a repressor is not functionally expressed (e.g. in the event of a loss-of-function mutation), the expression of the regulated gene is high, even under conditions of repression.

[0072] The term “toxin” refers to a gene whose product either directly or indirectly can result in the loss of viability under the condition of interest.

[0073] The term “essential gene” refers to a gene whose functional expression is necessary to maintain viability under the condition of interest.

[0074] The terms “two component system” (TCS) and “hybrid two component system” (HTCS) refer to a type of signal transduction pathway common in microorganisms, in which a sensor domain responds to an environmental signal (e.g. a molecule) and transduces the signal through conserved phosphotransfer domains which results in gene regulation, typically transcriptional regulation. There are two components in a canonical TCS, a histidine kinase and a response regulator. In a HTCS, the phosphotransfer domains are not canonically arranged, and domains associated with the histidine kinase and response regulator can be contained in a single protein. Herein, most principles apply to both TCS and HTCS and the terms TCS and HTCS are used interchangeably herein unless otherwise indicated.

[0075] The term “escape frequency” refers to the frequency at which biocontainment fails in a particular group of cells. For instance, a biocontainment implementation “with an escape frequency of 10⁻⁵” will produce a population of cells in which one cell in 10⁵ will be found to be viable outside of the conditions to which they have been restricted (e.g. when the control molecule is not present). Escape from biocontainment is typically the result of mutations that have disrupted the biocontainment mechanism.

[0076] The term “homology” or “sequence identity” used herein, may refer to a nucleotide-to-nucleotide or amino acid-to-amino acid correspondence of two polynucleotide or polypeptide sequences respectively. Sequence identity may be measured by any suitable alignment algorithm; for example using the BLAST algorithm (see e.g., the BLAST alignment tool available at blast.ncbi.nlm.nih.gov/Blast.cgi). Other alignment algorithms may also be used to measure the percent sequence identity between multiple polynucleotide or polypeptide sequences.

[0077] The term “therapeutic transgene” refers to a heterologous gene or DNA sequence which is capable of imparting a therapeutic benefit.

[0078] The term “diagnostic transgene” refers to a heterologous gene or DNA sequence which can be used to diagnose a condition or disease state.

[0079] As used herein, the term “functional fragment” of a biological entity (e.g., a gene, protein (e.g., an HTCS), promoter, or ribosome binding site) refers to a fragment of the full-length biological entity that retains, for example, at least 10%, at least 20%, at least 30%, at least 40%, at least 50%, at least 60%, at least 70%, at least 80%, at least 90%, or 100% of the biological activity of the corresponding full-length biologically entity.

### II. Two-Component Systems

[0080] The disclosure relates, in part, to a genetically modified bacterium that includes an activator, a promoter, and an essential gene operably linked to the promoter which can serve, in certain embodiments, to achieve biocontainment. The activator, promoter, and essential gene of the genetically modified bacterium can comprise a two-component system or hybrid two-component system (TCS or HTCS). When the bacterium is exposed to a control molecule, the control molecule binds to and activates the activator, which activates the promoter, causing the essential gene to be expressed. Accordingly, in certain embodiments, growth and/or viability of the bacterium is dependent upon the presence of the control molecule, which regulates expression of the essential gene.

[0081] In certain embodiments, the activator is a single polypeptide. In certain embodiments, the activator comprises two or more polypeptides. For example, an activator can be a single polypeptide that can both sense (e.g., bind to) a control molecule and activate a promoter. In certain embodiments, the activator comprises two polypeptides, one polypeptide that can sense (e.g., bind to) a control molecule and one polypeptide that can activate a promoter.

[0082] To avoid biocontainment escape, which can occur when the TCS or HTCS mutates to become constitutively active (e.g., by point mutation) or through alternative mechanism (e.g., by transposon insertions into the promoter, genomic rearrangements upstream of the essential gene, etc.), multiple TCSs or HTCSs can be used. In particular, incorporating different activator/promoter pairs that do not cross-activate provides redundancy and reduces the escape rate.

[0083] Accordingly, in certain embodiments, the bacterium can also include a second activator that is activated by the same control molecule or a different control molecule, a second promoter that is activated by the second activator, and a second essential gene that is operably linked to the second promoter. In certain embodiments, the first promoter is not activated by the second activator and the second promoter is not activated by the first activator.

[0084] In certain embodiments, the bacterium further comprises a third activator that is activated by the same control molecule or a different molecule, a third promoter that is activated by the third activator, and a third essential gene that is operably linked to the third promoter. In certain embodiments, the third promoter is not activated by the first or second activator and the third promoter is not activated by the first or second activator. In certain embodiments, the three activators are activated by three different control molecules, in certain embodiments, the three activators are activated by two different control molecules (i.e., one control molecule activates two of the activators, but not the third), and in certain embodiments, the three activators are activated by the same control molecule.

[0085] In certain embodiments, the bacterium comprises one or more transgenes encoding the first, second, and/or third activator.

[0086] In certain embodiments, the first, second, and/or third activator is a two-component system or hybrid two-component system (TCS or HTCS) protein comprising a sensor domain and a regulatory domain. In certain embodiments, the sensor domain binds to a control molecule, and the regulatory domain activates the promoter of the essential gene. In certain embodiments, the first, second, and/or third activator is a hybrid two-component system (HTCS) protein comprising a sensor domain and a regulatory domain.

[0087] In certain embodiments, the regulatory domain comprises an AraC family helix-turn-helix motif (see, e.g., Religa et al. (2007) PNAS 102(22):9272-7).

[0088] The TCS or HTCS protein can be a naturally occurring TCS or HTCS protein, or a functional fragment or variant thereof. For example, the naturally occurring TCS or HTCS protein can be a bacterial TCS or HTCS protein, such as a Bacteroides (e.g., Bacteroides ovatus, Bacteroides dorei, Bacteroides nordii, Bacteroides salyersiae, or Bacteroides uniformis) HTCS protein.

[0089] In certain embodiments, the TCS or HTCS protein is a chimeric TCS or HTCS protein, wherein the sensor domain is a sensor domain from a first naturally-occurring TCS or HTCS protein, or a functional fragment or variant thereof, and the regulatory domain is a regulatory domain from a second naturally-occurring TCS or HTCS protein, or a functional fragment or variant thereof.

[0090] In one embodiment of the chimeric HTCS protein, the sensor of one HTCS is linked to the DNA-binding region of a second HTCS (see, e.g., FIG. 14A). This can be done by replacing the sensor domain of a second HTCS with the sensor domain of the first HTCS such that the chimeric HTCS senses the control molecule but targets a different promoter than the first, as described in more detail in Example 6.

[0091] To create a chimeric TCS, the sensor domain of one TCS (e.g., a naturally-occurring TCS) can be used in conjunction with the regulatory domain of a second TCS (e.g., a naturally-occurring TCS). Unlike an HTCS protein, in the chimeric TCS, the sensor domain and the regulatory domain are on separate polypeptides, and therefore only one of the two polypeptides (either the histidine kinase or the response regulator) will be a “chimeric” protein in the traditional sense. However, a similar system can be designed, for example, by engineering a bacterium that comprises the sensor domain of a first TCS with the regulatory domain of a first TCS and the regulatory domain of a second TCS, whereby the sensor domain of the first TCS activates the regulatory domain of both the first and second TCS.

[0092] As it is important to consider that the newly designed promoter only responds to the chimeric activation molecule and not to molecules produced by or commonly encountered by the host or to other HTCS or other regulators native to the host, the TCS or HTCS should contain regulatory domains either absent or rarely found in the biocontained strain.

[0093] In certain embodiments, the HTCS protein comprises the amino acid sequence of SEQ ID NO: 19, 23, 25, 38, 39, 42, 43, 51, 52, 53, 54, 59, or 64-71, or a functional fragment or variant thereof, or an amino acid sequence having at least 80%, at least 85%, at least 90%, at least 91%, at least 92%, at least 93%, at least 94%, at least 95%, at least 96%, at least 97%, at least 98%, or at least 99% identity to any one of SEQ ID NOs: 19, 23, 25, 38, 39, 42, 43, 51, 52, 53, 54, 59, or 64-71, or a functional fragment or variant thereof.

[0094] The sensor domain is typically about half of the total protein sequence and the regulatory domain is the remaining half of the protein. The regulatory domain may, e.g., comprise a DNA-binding domain, e.g., a helix-loop-helix domain, that recognizes a promoter sequence. In certain embodiments, the HTCS protein of SEQ ID NO: 19 comprises a sensor domain from about amino acid 1 to about amino acid 751, a regulatory domain from about amino acid 752 to about amino acid 1323, with a DNA-binding domain from about amino acid 1233 to about amino acid 1313. In certain embodiments, the HTCS protein of SEQ ID NO: 23 comprises a sensor domain from about amino acid 1 to about amino acid 787, a regulatory domain from about amino acid 788 to about amino acid 1368, with a DNA-binding domain from about amino acid 1279 to about amino acid 1359. In certain embodiments, the HTCS protein of SEQ ID NO: 25 comprises a sensor domain from about amino acid 1 to about amino acid 248, a regulatory domain from about amino acid 249 to about amino acid 772, with a DNA-binding domain from about amino acid 699 to about amino acid 772. In certain embodiments, the HTCS protein of SEQ ID NO: 38 comprises a sensor domain from about amino acid 1 to about amino acid 774, a regulatory domain from about amino acid 775 to about amino acid 1349, with a DNA-binding domain from about amino acid 1261 to about amino acid 1341. In certain embodiments, the HTCS protein of SEQ ID NO: 39 comprises a sensor domain from about amino acid 1 to about amino acid 751, a regulatory domain from about amino acid 752 to about amino acid 1326, with a DNA-binding domain from about amino acid 1238 to about amino acid 1318. In certain embodiments, the HTCS protein of SEQ ID NO: 42 comprises a sensor domain from about amino acid 1 to about amino acid 768, a regulatory domain from about amino acid 769 to about amino acid 1336, with a DNA-binding domain from about amino acid 1249 to about amino acid 1329. In certain embodiments, the HTCS protein of SEQ ID NO: 43 comprises a sensor domain from about amino acid 1 to about amino acid 751, a regulatory domain from about amino acid 752 to about amino acid 1319, with a DNA-binding domain from about amino acid 1232 to about amino acid 1312. In certain embodiments, the HTCS protein of SEQ ID NO: 51 comprises a sensor domain from about amino acid 1 to about amino acid 775, and a regulatory domain from about amino acid 776 to about amino acid 1349, with a DNA-binding domain from about amino acid 1259 to about amino acid 1339. In certain embodiments, the HTCS protein of SEQ ID NO: 52 comprises a sensor domain from about amino acid 1 to about amino acid 760, a regulatory domain from about amino acid 761 to about amino acid 1311, with a DNA-binding domain from about amino acid 1226 to about amino acid 1306. In certain embodiments, the HTCS protein of SEQ ID NO: 53 comprises a sensor domain from about amino acid 1 to about amino acid 751, a regulatory domain from about amino acid 752 to about amino acid 1325, with a DNA-binding domain from about amino acid 1235 to about amino acid 1315. In certain embodiments, the HTCS protein of SEQ ID NO: 54 comprises a sensor domain from about amino acid 1 to about amino acid 751. a regulatory domain from about amino acid 752 to about amino acid 1302, with a DNA-binding domain from about amino acid 1217 to about amino acid 1297. In certain embodiments, the HTCS protein of SEQ ID NO: 59 comprises a sensor domain from about amino acid 1 to about amino acid 751, a regulatory domain from about amino acid 752 to about amino acid 1326, with a DNA-binding domain from about amino acid 1238 to about amino acid 1318. In certain embodiments, the HTCS protein of SEQ ID NO: 64 comprises a sensor domain from about amino acid 1 to about amino acid 751, a regulatory domain from about amino acid 752 to about amino acid 1326, with a DNA-binding domain from about amino acid 1238 to about amino acid 1318. In certain embodiments, the HTCS protein of SEQ ID NO: 65 comprises a sensor domain from about amino acid 1 to about amino acid 751, a regulatory domain from about amino acid 752 to about amino acid 1326, with a DNA-binding domain from about amino acid 1238 to about amino acid 1318. In certain embodiments, the HTCS protein of SEQ ID NO: 66 comprises a sensor domain from about amino acid 1 to about amino acid 751, a regulatory domain from about amino acid 752 to about amino acid 1326, with a DNA-binding domain from about amino acid 1238 to about amino acid 1318. In certain embodiments, the HTCS protein of SEQ ID NO: 67 comprises a sensor domain from about amino acid 1 to about amino acid 751, a regulatory domain from about amino acid 752 to about amino acid 1326, with a DNA-binding domain from about amino acid 1238 to about amino acid 1318. In certain embodiments, the HTCS protein of SEQ ID NO: 68 comprises a sensor domain from about amino acid 1 to about amino acid 751, a regulatory domain from about amino acid 752 to about amino acid 1326, with a DNA-binding domain from about amino acid 1238 to about amino acid 1318. In certain embodiments, the HTCS protein of SEQ ID NO: 69 comprises a sensor domain from about amino acid 1 to about amino acid 751, a regulatory domain from about amino acid 752 to about amino acid 1326, with a DNA-binding domain from about amino acid 1238 to about amino acid 1318. In certain embodiments, the HTCS protein of SEQ ID NO: 70 comprises a sensor domain from about amino acid 1 to about amino acid 751, a regulatory domain from about amino acid 752 to about amino acid 1326, with a DNA-binding domain from about amino acid 1238 to about amino acid 1318. In certain embodiments, the HTCS protein of SEQ ID NO: 71 comprises a sensor domain from about amino acid 1 to about amino acid 751, a regulatory domain from about amino acid 752 to about amino acid 1326, with a DNA-binding domain from about amino acid 1238 to about amino acid 1318.

[0095] Accordingly, in certain embodiments, a contemplated HTCS protein comprises a sensor domain comprising an amino acid sequence comprising amino acids 1-751 of SEQ ID NO: 19, 1-787 of SEQ ID NO: 23, 1-248 of SEQ ID NO: 25, 1-774 of SEQ ID NO: 38, 1-751 of SEQ ID NO: 39, 1-768 of SEQ ID NO: 42, 1-751 of SEQ ID NO: 43, 1-775 of SEQ ID NO: 51, 1-760 of SEQ ID NO: 52, 1-751 of SEQ ID NO: 53, 1-751 of SEQ ID NO: 54, 1-751 of SEQ ID NO: 59, 1-751 of SEQ ID NO: 64, 1-751 of SEQ ID NO: 65, 1-751 of SEQ ID NO: 66, 1-751 of SEQ ID NO: 67, 1-751 of SEQ ID NO: 68, 1-751 of SEQ ID NO: 69, 1-751 of SEQ ID NO: 70, or 1-751 of SEQ ID NO: 71, or a functional fragment or variant thereof, or an amino acid sequence having at least 80%, at least 85%, at least 90%, at least 91%, at least 92%, at least 93%, at least 94%, at least 95%, at least 96%, at least 97%, at least 98%, or at least 99% identity to amino acids 1-751 of SEQ ID NO: 19, 1-787 of SEQ ID NO: 23, 1-248 of SEQ ID NO: 25, 1-774 of SEQ ID NO: 38, 1-751 of SEQ ID NO: 39, 1-768 of SEQ ID NO: 42, 1-751 of SEQ ID NO: 43, 1-775 of SEQ ID NO: 51, 1-760 of SEQ ID NO: 52, 1-751 of SEQ ID NO: 53, 1-751 of SEQ ID NO: 54, 1-751 of SEQ ID NO: 59, 1-751 of SEQ ID NO: 64, 1-751 of SEQ ID NO: 65, 1-751 of SEQ ID NO: 66, 1-751 of SEQ ID NO: 67, 1-751 of SEQ ID NO: 68, 1-751 of SEQ ID NO: 69, 1-751 of SEQ ID NO: 70, or 1-751 of SEQ ID NO: 71.

[0096] In certain embodiments, a contemplated HTCS protein comprises a regulatory domain comprising an amino acid sequence comprising amino acids 752-1323 or 1233-1313 of SEQ ID NO: 19, 788-1368 or 1279-1359 of SEQ ID NO: 23, 249-772 or 699-772 of SEQ ID NO: 25, 775-1349 or 1261-1341 of SEQ ID NO: 38, 752-1326 or 1238-1318 of SEQ ID NO: 39, 769-1336 or 1249-1329 of SEQ ID NO: 42, 752-1319 or 1232-1312 of SEQ ID NO: 43, 776-1349 or 1259-1339 of SEQ ID NO: 51, 761-1311 or 1226-1306 of SEQ ID NO: 52, 752-1325 or 1235-1315 of SEQ ID NO: 53, 752-1302 or 1217-1297 of SEQ ID NO: 54, 752-1326 or 1238-1318 of SEQ ID NO: 59, 752-1326 or 1238-1318 of SEQ ID NO: 64, 752-1326 or 1238-1318 of SEQ ID NO: 65, 752-1326 or 1238-1318 of SEQ ID NO: 66, 752-1326 or 1238-1318 of SEQ ID NO: 67, 752-1326 or 1238-1318 of SEQ ID NO: 68, 752-1326 or 1238-1318 of SEQ ID NO: 69, 752-1326 or 1238-1318 of SEQ ID NO: 70, or 752-1326 or 1238-1318 of SEQ ID NO: 71, or a functional fragment or variant thereof, or an amino acid sequence having at least 80%, at least 85%, at least 90%, at least 91%, at least 92%, at least 93%, at least 94%, at least 95%, at least 96%, at least 97%, at least 98%, or at least 99% identity to amino acids 752-1323 or 1233-1313 of SEQ ID NO: 19, 788-1368 or 1279-1359 of SEQ ID NO: 23, 249-772 or 699-772 of SEQ ID NO: 25, 775-1349 or 1261-1341 of SEQ ID NO: 38, 752-1326 or 1238-1318 of SEQ ID NO: 39, 769-1336 or 1249-1329 of SEQ ID NO: 42, 752-1319 or 1232-1312 of SEQ ID NO: 43, 776-1349 or 1259-1339 of SEQ ID NO: 51, 761-1311 or 1226-1306 of SEQ ID NO: 52, 752-1325 or 1235-1315 of SEQ ID NO: 53, 752-1302 or 1217-1297 of SEQ ID NO: 54, 752-1326 or 1238-1318 of SEQ ID NO: 59, 752-1326 or 1238-1318 of SEQ ID NO: 64, 752-1326 or 1238-1318 of SEQ ID NO: 65, 752-1326 or 1238-1318 of SEQ ID NO: 66, 752-1326 or 1238-1318 of SEQ ID NO: 67, 752-1326 or 1238-1318 of SEQ ID NO: 68, 752-1326 or 1238-1318 of SEQ ID NO: 69, 752-1326 or 1238-1318 of SEQ ID NO: 70, or 752-1326 or 1238-1318 of SEQ ID NO: 71. In certain embodiments, a contemplated HTCS protein comprises (i) a sensor domain comprising an amino acid sequence comprising amino acids 1-751 of SEQ ID NO: 19, 1-787 of SEQ ID NO: 23, 1-248 of SEQ ID NO: 25, 1-774 of SEQ ID NO: 38, 1-751 of SEQ ID NO: 39, 1-768 of SEQ ID NO: 42, 1-751 of SEQ ID NO: 43, 1-775 of SEQ ID NO: 51, 1-760 of SEQ ID NO: 52, 1-751 of SEQ ID NO: 53, 1-751 of SEQ ID NO: 54, 1-751 of SEQ ID NO: 59, 1-751 of SEQ ID NO: 64, 1-751 of SEQ ID NO: 65, 1-751 of SEQ ID NO: 66, 1-751 of SEQ ID NO: 67, 1-751 of SEQ ID NO: 68, 1-751 of SEQ ID NO: 69, 1-751 of SEQ ID NO: 70, or 1-751 of SEQ ID NO: 71, or a functional fragment or variant thereof, or an amino acid sequence having at least 80%, at least 85%, at least 90%, at least 91%, at least 92%, at least 93%, at least 94%, at least 95%, at least 96%, at least 97%, at least 98%, or at least 99% identity to amino acids 1-751 of SEQ ID NO: 19, 1-787 of SEQ ID NO: 23, 1-248 of SEQ ID NO: 25, 1-774 of SEQ ID NO: 38, 1-751 of SEQ ID NO: 39, 1-768 of SEQ ID NO: 42, 1-751 of SEQ ID NO: 43, 1-775 of SEQ ID NO: 51, 1-760 of SEQ ID NO: 52, 1-751 of SEQ ID NO: 53, 1-751 of SEQ ID NO: 54, 1-751 of SEQ ID NO: 59, 1-751 of SEQ ID NO: 64, 1-751 of SEQ ID NO: 65, 1-751 of SEQ ID NO: 66, 1-751 of SEQ ID NO: 67, 1-751 of SEQ ID NO: 68, 1-751 of SEQ ID NO: 69, 1-751 of SEQ ID NO: 70, or 1-751 of SEQ ID NO: 71: and (ii) a regulatory domain comprising an amino acid sequence comprising amino acids 752-1323 or 1233-1313 of SEQ ID NO: 19, 788-1368 or 1279-1359 of SEQ ID NO: 23, 249-772 or 699-772 of SEQ ID NO: 25, 775-1349 or 1261-1341 of SEQ ID NO: 38, 752-1326 or 1238-1318 of SEQ ID NO: 39, 769-1336 or 1249-1329 of SEQ ID NO: 42, 752-1319 or 1232-1312 of SEQ ID NO: 43, 776-1349 or 1259-1339 of SEQ ID NO: 51, 761-1311 or 1226-1306 of SEQ ID NO: 52, 752-1325 or 1235-1315 of SEQ ID NO: 53, 752-1302 or 1217-1297 of SEQ ID NO: 54, 752-1326 or 1238-1318 of SEQ ID NO: 59, 752-1326 or 1238-1318 of SEQ ID NO: 64, 752-1326 or 1238-1318 of SEQ ID NO: 65, 752-1326 or 1238-1318 of SEQ ID NO: 66, 752-1326 or 1238-1318 of SEQ ID NO: 67, 752-1326 or 1238-1318 of SEQ ID NO: 68, 752-1326 or 1238-1318 of SEQ ID NO: 69, 752-1326 or 1238-1318 of SEQ ID NO: 70, or 752-1326 or 1238-1318 of SEQ ID NO: 71, or a functional fragment or variant thereof, or an amino acid sequence having at least 80%, at least 85%, at least 90%, at least 91%, at least 92%, at least 93%, at least 94%, at least 95%, at least 96%, at least 97%, at least 98%, or at least 99% identity to amino acids 752-1323 or 1233-1313 of SEQ ID NO: 19, 788-1368 or 1279-1359 of SEQ ID NO: 23, 249-772 or 699-772 of SEQ ID NO: 25, 775-1349 or 1261-1341 of SEQ ID NO: 38, 752-1326 or 1238-1318 of SEQ ID NO: 39, 769-1336 or 1249-1329 of SEQ ID NO: 42, 752-1319 or 1232-1312 of SEQ ID NO: 43, 776-1349 or 1259-1339 of SEQ ID NO: 51, 761-1311 or 1226-1306 of SEQ ID NO: 52, 752-1325 or 1235-1315 of SEQ ID NO: 53, 752-1302 or 1217-1297 of SEQ ID NO: 54, 752-1326 or 1238-1318 of SEQ ID NO: 59, 752-1326 or 1238-1318 of SEQ ID NO: 64, 752-1326 or 1238-1318 of SEQ ID NO: 65, 752-1326 or 1238-1318 of SEQ ID NO: 66, 752-1326 or 1238-1318 of SEQ ID NO: 67, 752-1326 or 1238-1318 of SEQ ID NO: 68, 752-1326 or 1238-1318 of SEQ ID NO: 69, 752-1326 or 1238-1318 of SEQ ID NO: 70, or 752-1326 or 1238-1318 of SEQ ID NO: 71.

[0097] A first domain (e.g., a sensor domain) and a second domain (e.g., a regulatory domain) in a contemplated protein (e.g., an HTCS protein) may be coupled by a linker. The linker may be a cleavable linker or a non-cleavable linker. Optionally or in addition, the linker may be a flexible linker or an inflexible linker. The linker should be a length sufficiently long to allow the first and second domains to be linked without steric hindrance from one another and sufficiently short to retain the intended activity of the protein. The linker preferably is sufficiently hydrophilic to avoid or minimize instability of the protein. The linker preferably is sufficiently hydrophilic to avoid or minimize insolubility of the protein. The linker should be sufficiently stable in vivo (e.g., it is not cleaved by enzymes, etc.) to permit the fusion protein to be operative in vivo.

[0098] The linker may be from about 1 angstroms (Å) to about 150 Å in length, or from about 1 Å to about 120 Å in length, or from about 5 Å to about 110 Å in length, or from about 10 Å to about 100 Å in length. The linker may be greater than about 2, 3, 4, 5, 6, 7, 8, 9, 10, 11, 12, 13, 14, 15, 16, 17, 18, 19, 20, 25, 27, 30 or greater angstroms in length and/or less than about 110, 100, 90, 85, 80, 75, 70, 65, 60, 55, 50, 45, 43, 42, 41, 40, 39, 38, 37, 36, 35, 34, 33, 32, 31, or fewer Å in length. Furthermore, the linker may be about 5, 10, 15, 20, 25, 30, 35, 40, 45, 50, 55, 60, 65, 70, 75, 80, 85, 90, 95, 100, 110, and 120 Å in length.

[0099] In certain embodiments, the linker comprises a polypeptide linker. When a linker is employed, the linker may comprise hydrophilic amino acid residues, such as Gln, Ser, Gly, Glu, Pro, His and Arg. In certain embodiments, the linker is a peptide containing 1-25 amino acid residues, 1-20 amino acid residues, 2-15 amino acid residues, 3-10 amino acid residues, 3-7 amino acid residues, 4-25 amino acid residues, 4-20 amino acid residues, 4-15 amino acid residues, 4-10 amino acid residues, 5-25 amino acid residues, 5-20 amino acid residues, 5-15 amino acid residues, 5-10 amino acid residues, or 1, 2, 3, 4, 5, 6, 7, 8, 9, or 10 amino acid residues. Exemplary linkers include glycine and serine-rich linkers, e.g., (GlyGlyPro)ₙ, or (GlyGlyGlyGlySer)ₙ, where n is 1-5. In certain embodiments, the linker is (Gly₄Ser)₂. Additional exemplary linker sequences are disclosed, e.g., in George et al. (2003) PROTEIN ENGINEERING 15:871-879, and U.S. Pat. Nos. 5,482,858 and 5,525,491. In certain embodiments, the linker is derived from a naturally occurring protein, e.g., a naturally occurring HTCS protein. In certain embodiments, the linker comprises NPPF (SEQ ID NO: 78), KAPW (SEQ ID NO: 79), APPF (SEQ ID NO: 80), LPPW (SEQ ID NO: 81), or KPPF (SEQ ID NO: 82). In certain embodiments, the linker comprises 4 or more amino acid residues, of which 2 or more are proline. For example, In certain embodiments, the linker comprises X₁PPX₄ (SEQ ID NO: 83), wherein X₁ and X₄ are any amino acid.

[0100] Use of an TCS or HTCS reduces the escape rate of a bacterial strain. In certain embodiments, culturing of the bacterium results in a bacterium that is capable of growth and/or viability in the absence of the control molecule at a frequency of less than 10⁻⁵, 10⁻⁶, 10⁻⁷, 10⁻⁸, or 10⁻⁹. In certain embodiments, following culture of the bacterium with the control molecule and subsequent removal of the control molecule from the culture, the bacteria is viable in the culture for less than 3 days, less than 2 days, less than a day, or less than 12 hours. In certain embodiments, following culture of the bacterium with the control molecule and subsequent removal of the control molecule from the culture, the bacteria is capable of dividing less than 10 times, 9 times, 8 times, 7 times, 6 times, 5 times, 4 times, 3 time, twice or once.

[0101] In certain embodiments, following administration of the bacterium and control molecule to a subject, e.g., a human subject, the amount of bacteria in the subject decreases at least about 10-fold, 5-fold, or 2 fold within 2 days of removal or discontinuation of the control molecule from the subject. The amount of bacteria in the subject can be measured by any means known in the art, for example, by quantitative PCR (e.g., of the therapeutic gene), or by plating a sample on plates containing the control molecule as the sole carbon source and counting CFUs.

[0102] In certain embodiments, the first, second, and/or third promoter comprises a the nucleotide sequence of any one of SEQ ID NOs: 1-13, 44-46, 62, 63, or 73, or a functional fragment or variant thereof, or nucleotide sequence having at least 80%, at least 85%, at least 90%, at least 95%, at least 96%, at least 97%, at least 98%, or at least 99% identity to any one of SEQ ID NOs: 1-13, 44-46, 62, 63, or 73, or a functional fragment or variant thereof. In certain embodiments, the first, second, and/or third promoter comprises the nucleotide sequence of SEQ ID NO: 1, 2, 7, 8, 9, 10, 11, 12, 13, 45, 46, 62, 63, or 73, or a functional fragment or variant thereof (e.g., SEQ ID NO: 44), or a nucleotide sequence having at least 80%, at least 85%, at least 90%, at least 95%, at least 96%, at least 97%, at least 98%, or at least 99% identity to any one of SEQ ID NOs: 1, 2, 7, 8, 9, 10, 11, 12, 13, 45, 46, 62, 63, or 73, or a functional fragment or variant thereof (e.g., SEQ ID NO: 44). SEQ ID NO: 44, called Ppor10s6v7, is a minimal porphyran-responsive promoter, which is a truncated form of SEQ ID NO: 8 comprising mutations which can, in certain embodiments, improve activity.

[0103] In certain embodiments, the first, second, and/or third activator and/or promoter is heterologous to the bacterium. In certain embodiments, the first, second, and/or third gene is not operably linked to the first, second, and/or third promoter, respectively, in a similar or otherwise identical bacterium that has not been modified.

[0104] In addition to implementing a system in which essential genes are directly transcriptionally controlled by TCSs or HTCSs as described above, it will be recognized by those skilled in the art that this system may also be implemented with TCSs or HTCSs indirectly regulating essential gene function. For instance, the TCSs or HTCSs may control expression of one or more different activators which then drive expression of the essential gene. Those skilled in the art will also recognize alternatives to transcriptional regulation as a means of functionally linking TCS or HTCS activity to essential gene function. For instance, the biocontainment strategy described here can also be implemented by controlling essential gene translation, maturation, post-translational modification or localization. For instance, the TCS or HTCS may drive expression of RNA molecules that alter translation initiation, chaperones that ensure proper protein folding. proteases that mediate post-translational processing, or a variety of other factors that may be used alone or in combination to indirectly control essential gene function. Those skilled in the art will also recognize that the principle of TCS or HTCS regulation of essential genes can be applied to redundant gene pairs that on their own are not essential but when both deleted together result in a loss of viability. In this case, the TCS or HTCS can be linked to the function of both genes as a means of controlling viability or one of the redundant genes can simply be deleted to ensure that the other is essential on its own.

[0105] In certain embodiments, biocontainment is implemented with a carbohydrate-control biocontainment strategy, whereby the ability of the recombinant microbe to grow on carbohydrates found in the gut is limited and a control molecule is supplied. Limiting the ability of the recombinant microbe to grow on carbohydrates found in the gut can be achieved by knocking out a native polysaccharide utilization locus (PULs). PULs can be identified by searching for putative operons that contain SusC and SusD homologs (see, e.g., Xu et al. (2003). SYMBIOSIS 299, 2074-2077, which identified at least 12 putative PULs in B. thetaiotaomicron: BTO139-BT0146, BT0188- BT0196, BT0752-BT0758, BT1278-BT1287, BT1617-BT1622, BT1871-BT1877, BT2189-BT2198, BT2457-BT2463, BT3517-BT3532, BT3748-BT3754, BT4629-BT4636 and BT4722-BT4730). PULs can be deleted in full or in part using established methods (Koropatkin et al. (2008) STRUCTURE 16, 1105-1115). Deletion of a single PUL or multiple PULs can be used to partially or fully eliminate viability in the gut. The deletion of multiple PULs can be performed in series using established methods (Koropatkin et al., supra). A heterologous PUL can then be introduced to impart the ability to grow on a carbohydrate not commonly found in the gut. Though a large number of carbohydrate-PUL pairs may be capable of at least partially restoring viability, the ideal carbohydrate would be one that is not degraded by other gut microbes, such as the porphyran PUL described above. Transfer of the porphyran PUL can be performed as described in Examples below.

### IV. Essential Genes

[0106] An essential gene is a gene whose functional expression is necessary to maintain viability under the condition of interest. In certain embodiments, the essential gene is selected from thymidylate synthase (ThyA), arginyl-tRNA synthetase (argS), cysteinyl-tRNA synthetase (cysS), penicillin tolerance protein (lytB) and peptide chain release factor (RF-2). Other exemplary essential genes include those listed in TABLE 1. Table 1 provides predicted essential genes for B. thetaiotaomicron (Goodman et al. (2009) CELL HOST MICROBE 6(3):279-289.) Essential genes for other bacteria are known in the art, or can be identified as genes having 80% or more sequence identity to those listed in TABLE 1 (e.g., genes that are orthologous to those listed in TABLE 1).

TABLE 1

| | Gene length | |
|---|---|---|
| GeneID | (bp) | Annotation |
| BT0004 | 668 | hypothetical protein |
| BT0048 | 476 | hypothetical protein |
| BT0119 | 443 | conserved hypothetical protein |
| BT0130 | 815 | putative oxidoreductase |
| BT0205 | 1925 | glutamine-dependent NAD+ synthetase |
| BT0251 | 743 | dolichol-phosphate mannosyltransferase |
| BT0286 | 446 | hypothetical protein |
| BT0287 | 425 | putative biopolymer transmembrane protein |
| BT0307 | 1646 | phosphofructokinase |
| BT0319 | 371 | conserved hypothetical protein |
| BT0328 | 2042 | conserved hypothetical protein |
| BT0337 | 482 | hypothetical protein |
| BT0375 | 689 | integrase |
| BT0402 | 509 | hypothetical protein |
| BT0422 | 1940 | threonyl-tRNA synthetase |
| BT0423 | 557 | translation initiation factor IF-3 |
| BT0437 | 1190 | N-acylglucosamine 2-epimerase |
| BT0475 | 593 | putative phosphoheptose isomerase |
| BT0546 | 725 | hypothetical protein |
| BT0547 | 1232 | aspartate aminotransferase |
| BT0552 | 1340 | glutamate synthase, small subunit |
| BT0560 | 1229 | outer membrane efflux protein |
| BT0577 | 1766 | LysM-repeat proteins and domains |
| BT0589 | 1856 | putative inner membrane protein translocase |
| | | com . . . |
| BT0590 | 1613 | CTP synthase (UTP-ammonia ligase) |
| BT0595 | 956 | integrase |
| BT0624 | 824 | 4-diphosphocytidyl-2-C-methyl-D-erythritol |
| | | kinase |
| BT0625 | 1553 | DNA helicase |
| BT0626 | 2462 | phenylalanyl-tRNA synthetase beta chain |
| BT0688 | 668 | cAMP-binding domain (catabolite gene activator) |
| | | transcriptional regulator |
| BT0698 | 821 | 3-methyl-2-oxobutanoate hydroxymethyltrans- |
| | | ferase |
| BT0743 | 2339 | penicillin-binding protein 1A (PBP-1a) |
| BT0745 | 752 | 3-deoxy-manno-octulosonate cytidylyltrans- |
| | | ferase |
| BT0748 | 917 | ribose-phosphate pyrophosphokinase |
| BT0758 | 572 | acetyltransferase |
| BT0789 | 887 | malonyl CoA-acyl carrier protein transacylase |
| BT0795 | 620 | similar to DNA-binding protein |
| BT0806 | 3488 | isoleucyl-tRNA synthetase |
| BT0834 | 1097 | putative permease |
| BT0850 | 524 | putative transcriptional regulator |
| BT0872 | 1763 | aspartyl-tRNA synthetase |
| BT0883 | 830 | hypothetical protein |
| BT0888 | 776 | AMP nucleosidase |
| BT0889 | 1019 | similar to DNA polymerase III, delta subunit |
| BT0890 | 470 | putative DNA-binding protein |
| BT0894 | 2000 | DNA ligase |
| BT0895 | 893 | dihydrodipicolinate synthase |
| BT0899 | 2576 | DNA gyrase subunit A |
| BT0914 | 959 | recognition particle-docking protein FtsY |
| BT0920 | 1019 | putative O-sialoglycoprotein endopeptidase |
| BT0922 | 881 | putative lipoprotein |
| BT0928 | 677 | two-component system response regulator |
| BT0929 | 1493 | prolyl-tRNA synthetase |
| BT0934 | 290 | hypothetical protein |
| BT0947 | 587 | integrase |
| BT0972 | 809 | putative oxidoreductase |
| BT0976 | 1253 | putative transport protein |
| BT1021 | 851 | arabinosidase |
| BT1053 | 608 | RNA polymerase ECF-type sigma factor |
| BT1055 | 626 | pyruvate formate-lyase activating enzyme |
| BT1066 | 569 | conserved hypothetical protein |
| BT1124 | 926 | putative integrase |
| BT1215 | 1220 | ABC transporter, permease protein |
| BT1263 | 527 | putative protease I |
| BT1274 | 638 | L-fuculose-1-phosphate aldolase |
| BT1311 | 860 | RNA polymerase sigma factor rpoD (Sigma-A) |
| BT1317 | 602 | riboflavin synthase alpha chain |
| BT1325 | 1739 | glutaminyl-tRNA synthetase |
| BT1335 | 1475 | folylpolyglutamate synthase |
| BT1362 | 1202 | flavoprotein |
| BT1363 | 833 | DNA Pol III Epsilon Chain |
| BT1364 | 1124 | DNA polymerase III, beta chain |
| BT1368 | 995 | UDP-N-acetylenolpyruvoylglucosamine reductase |
| BT1369 | 848 | conserved hypothetical protein |
| BT1384 | 419 | hypothetical protein |
| BT1475 | 1157 | ABC transporter, permease protein |
| BT1484 | 1571 | conserved hypothetical protein with a |
| | | conserved domain |
| BT1495 | 605 | siderophore (surfactin) biosynthesis |
| | | regulatory protein |
| BT1500 | 1574 | Ribonuclease G |
| BT1541 | 581 | putative transmembrane protein |
| BT1593 | 1280 | putative cell-cycle protein |
| BT1595 | 2168 | transcription termination factor rho |
| BT1601 | 1322 | putative signal recognition protein |
| BT1610 | 1859 | DNA polymerase III subunit gamma/tau |
| BT1637 | 626 | conserved hypothetical protein |
| BT1669 | 1019 | phenylalanyl-tRNA synthetase alpha chain |
| BT1672 | 1259 | phosphoglycerate kinase |
| BT1691 | 1004 | fructose-bisphosphate aldolase |
| BT1700 | 1199 | hypothetical protein |
| BT1732 | 653 | amino acid exporter, putative |
| BT1829 | 1637 | 60 kDa chaperonin (groEL) |
| BT1840 | 1364 | histidyl-tRNA synthetase |
| BT1873 | 983 | endo-arabinase |
| BT1880 | 1142 | tetraacyldisaccharide 4′-kinase |
| BT1942 | 440 | hypothetical protein |
| BT1964 | 608 | hypothetical protein |
| BT1975 | 1508 | tRNA nucleotidyltransferase |
| BT2003 | 857 | putative membrane peptidase |
| BT2005 | 1304 | UDP-N-acetylglucosamine 1- |
| | | carboxyvinyltransferase |
| BT2007 | 695 | putative glycoprotease |
| BT2009 | 614 | guanylate kinase (GMP kinase) |
| BT2011 | 608 | putative nicotinate-nucleotide |
| | | adenylyltransferase |
| BT2016 | 1136 | dTDP-glucose 4,6-dehydratase |
| BT2017 | 875 | glucose-1-phosphate thymidylyltransferase |
| BT2047 | 794 | thymidylate synthase |
| BT2060 | 689 | cytidylate kinase |
| BT2061 | 869 | penicillin tolerance protein LytB |
| BT2122 | 1730 | lysyl-tRNA synthetase |
| BT2123 | 1037 | glycerol-3-phosphate dehydrogenase |
| BT2124 | 1337 | glucose-6-phosphate isomerase |
| BT2133 | 2708 | hypothetical protein |
| BT2143 | 1412 | chromosomal replication initiator |
| | | protein dnaA |
| BT2151 | 1028 | glycosyltransferase |
| BT2152 | 854 | putative acetyltransferase |
| BT2153 | 1331 | putative Fe—S oxidoreductases |
| BT2165 | 701 | two-component system response regulator |
| BT2177 | 608 | putative membrane protein |
| BT2184 | 494 | RNA polymerase ECF-type sigma factor |
| BT2192 | 1454 | putative lipoprotein |
| BT2206 | 809 | Zinc ABC transporter, permease |
| BT2230 | 3803 | DNA polymerase III alpha subunit |
| BT2231 | 686 | phosphatidylserine decarboxylase |
| BT2232 | 707 | CDP-diacylglycerol--serineO-phosphatidyl- |
| | | transferase |
| BT2238 | 746 | putative biotin--(acetyl-CoA carboxylase) |
| | | synthetase |
| BT2242 | 710 | uridylate kinase |
| BT2249 | 560 | ribosome recycling factor (ribosome |
| | | releasing factor) |
| BT2250 | 932 | putative GTPase |
| BT2282 | 572 | hypothetical protein |
| BT2293 | 1007 | conserved protein found in conjugate transposon |
| BT2372 | 947 | transcriptional regulator |
| BT2416 | 1214 | GTP cyclohydrolase II |
| BT2417 | 1850 | putative permease |
| BT2517 | 1841 | GcpE, 1-hydroxy-2-methyl-2-(E)-butenyl 4- |
| | | diphosphate synthase |
| BT2521 | 1484 | RNA polymerase sigma-54 |
| BT2525 | 1358 | cephalosporin-C deacetylase |
| BT2543 | 962 | riboflavin biosynthesis protein ribF, putative |
| | | riboflavin kinase |
| BT2548 | 995 | leucine aminopeptidase precursor |
| BT2584 | 824 | hypothetical protein |
| BT2595 | 929 | conserved protein found in conjugate transposon |
| BT2596 | 1298 | conserved protein found in conjugate transposon |
| BT2645 | 1082 | conserved hypothetical protein |
| BT2701 | 992 | DNA-directed RNA polymerase alpha chain |
| BT2702 | 605 | 30S ribosomal protein S4 |
| BT2704 | 380 | 30S ribosomal protein S13 |
| BT2707 | 1343 | preprotein translocase SecY subunit |
| BT2708 | 446 | 50S ribosomal protein L15 |
| BT2710 | 518 | 30S ribosomal protein S5 |
| BT2712 | 569 | 50S ribosomal protein L6 |
| BT2715 | 557 | 50S ribosomal protein L5 |
| BT2721 | 731 | 30S ribosomal protein S3 |
| BT2724 | 824 | 50S ribosomal protein L2 |
| BT2726 | 626 | 50S ribosomal protein L4 |
| BT2727 | 617 | 50S ribosomal protein L3 |
| BT2729 | 2117 | elongation factor G |
| BT2733 | 4283 | DNA-directed RNA polymerase beta′ chain |
| BT2734 | 3812 | DNA-directed RNA polymerase beta chain |
| BT2736 | 518 | ribosomal protein L10 |
| BT2737 | 698 | 50S ribosomal protein L1 |
| BT2739 | 542 | transcription anti-termination protein |
| BT2740 | 1184 | elongation factor Tu |
| BT2747 | 1223 | 3-deoxy-D-manno-octulosonic-acid transferase |
| BT2748 | 1514 | glutamyl-tRNA synthetase |
| BT2752 | 2456 | primosomal protein N′ (replication factor Y) |
| BT2754 | 980 | hypothetical protein |
| BT2761 | 638 | conserved hypothetical protein, similar to |
| | | O-methyltransferase |
| BT2765 | 551 | hypothetical protein |
| BT2796 | 2531 | hypothetical protein |
| BT2829 | 1793 | arginyl-tRNA synthetase |
| BT2838 | 1226 | putative lipoprotein releasing system |
| | | transmembrane permease |
| BT2883 | 584 | phosphoribosylglycinamide formyltransferase |
| BT2917 | 674 | conserved hypothetical protein |
| BT2925 | 602 | hypothetical protein |
| BT2985 | 446 | DNA repair protein |
| BT3031 | 626 | hypothetical protein |
| BT3033 | 1877 | DNA topoisomerase IV subunit B |
| BT3053 | 704 | putative cytochrome B subunit |
| BT3055 | 755 | succinate dehydrogenase iron-sulfur protein |
| BT3089 | 1490 | putative outer membrane protein, probably |
| | | involved in nutrient binding |
| BT3118 | 845 | prolipoprotein diacylglyceryl transferase |
| BT3126 | 2834 | leucyl-tRNA synthetase |
| BT3135 | 1232 | integrase |
| BT3212 | 794 | putative bacitracin resistance protein |
| BT3214 | 1058 | S-adenosylmethionine:tRNA ribosyltransferase- |
| | | isomerase |
| BT3219 | 1292 | S-adenosylmethionine synthetase |
| BT3230 | 1292 | tyrosyl-tRNA synthetase |
| BT3283 | 413 | conserved hypothetical protein with |
| | | conserved domain |
| BT3284 | 1232 | putative spore maturation protein A/B |
| BT3286 | 767 | hypothetical protein |
| BT3287 | 1448 | polysaccharide biosynthesis protein |
| BT3319 | 1481 | signal peptidase I |
| BT3351 | 1481 | cysteinyl-tRNA synthetase |
| BT3358 | 1262 | 3-oxoacyl-[acyl-carrier-protein] |
| | | synthase II |
| BT3386 | 1835 | ABC transporter, ATP-binding protein |
| BT3403 | 1319 | putative nitrogen utilization substance protein |
| BT3404 | 3122 | translation initiation factor IF-2 |
| BT3406 | 1454 | ABC transporter permease |
| BT3407 | 752 | ABC transporter ATP-binding protein |
| BT3408 | 1343 | conserved hypothetical protein, putative ABC |
| | | transporter permease component |
| BT3409 | 1211 | aminotransferase, putative cysteine desulfurase |
| BT3429 | 1961 | DNA gyrase subunit B |
| BT3435 | 317 | hypothetical protein |
| BT3438 | 422 | hypothetical protein |
| BT3444 | 1307 | cell division protein FtsZ |
| BT3445 | 1451 | cell division protein FtsA |
| BT3446 | 746 | cell division protein FtsQ |
| BT3447 | 1403 | UDP-N-acetylmuramate--alanine ligase |
| BT3448 | 1118 | UDP-N-acetylglucosamine--N-acetylmuramyl- |
| | | (pentapeptide) pyrophosphoryl- |
| | | undecaprenol N- |
| | | acetylglucosamine transferase |
| BT3449 | 1316 | rod shape-determining protein rodA |
| BT3450 | 1241 | UDP-N-acetylmuramoylalanine--D-glutamate |
| | | ligase |
| BT3451 | 1268 | phospho-N-acetylmuramoyl-pentapeptide- |
| | | transferase |
| BT3452 | 1448 | UDP-N-acetylmuramoylalanyl-D-glutamate--2,6- |
| | | diaminopimelate ligase |
| BT3453 | 2126 | penicillin-binding protein |
| BT3455 | 914 | S-adenosyl-methyltransferase mraW |
| BT3499 | 734 | conserved hypothetical protein |
| BT3532 | 1133 | aldose 1-epimerase precursor |
| BT3534 | 680 | hypothetical protein |
| BT3552 | 959 | peptide chain release factor RF-2 |
| BT3573 | 347 | hypothetical protein |
| BT3579 | 2552 | topoisomerase IV subunit A |
| BT3611 | 1541 | glycyl-tRNA synthetase |
| BT3636 | 1007 | aspartate-semialdehyde dehydrogenase |
| BT3638 | 2135 | Na+/H+ anti-porter |
| BT3639 | 716 | ThiF family protein, putative dinucleotide- |
| | | utilizing enzyme involved in molybdopterin |
| | | and thiamine biosynthesis |
| BT3640 | 656 | lipoprotein releasing system ATP-binding protein |
| BT3644 | 1298 | UDP-N-acetylmuramoylalanyl-D-glutamyl-2,6- |
| | | diaminopimelate-D-alanyl-D-alanyl ligase |
| BT3646 | 863 | dihydropteroate synthase |
| BT3647 | 686 | putative transmembrane protein |
| BT3652 | 788 | hypothetical protein |
| BT3653 | 566 | hypothetical protein |
| BT3692 | 1019 | phosphate acetyltransferase |
| BT3697 | 764 | UDP-2,3-diacylglucosamine hydrolase |
| BT3711 | 650 | hypothetical protein |
| BT3713 | 974 | D-alanine--D-alanine ligase |
| BT3714 | 1148 | Phospholipid/glycerol acyltransferase |
| BT3722 | 842 | glutamate racemase |
| BT3725 | 2657 | putative outer membrane protein |
| BT3726 | 734 | undecaprenyl pyrophosphate synthetase |
| BT3728 | 1019 | riboflavin biosynthesis protein ribD |
| BT3771 | 746 | 3-oxoacyl-[acyl-carrier protein] reductase |
| BT3780 | 1151 | putative glycosidase, PH1107-related |
| BT3798 | 1382 | putative exported fucosidase |
| BT3808 | 911 | nucleotidyltransferase family protein |
| BT3813 | 1022 | rod shape-determining protein MreB |
| BT3814 | 842 | rod shape-determining protein |
| BT3816 | 1862 | penicillin-binding protein 2 (PBP-2) |
| BT3817 | 1457 | rod shape-determining protein rodA |
| BT3820 | 1124 | putative DNA polymerase III, delta subunit |
| BT3834 | 1007 | 3-oxoacyl-[acyl-carrier-protein] synthase III |
| BT3835 | 881 | putative GTP-binding protein |
| BT3836 | 1313 | putative phosphoglycerate dehydrogenase |
| BT3837 | 767 | ABC transporter ATP-binding protein |
| BT3848 | 1382 | peptidyl-prolyl cis-trans isomerase |
| BT3849 | 1730 | hypothetical protein |
| BT3856 | 695 | conserved hypothetical protein |
| BT3864 | 1100 | tryptophanyl-tRNA synthetase |
| BT3868 | 1985 | beta-N-hexosaminidase, glycosyl hyrolase |
| | | family 20 |
| BT3872 | 1490 | ribosomal large subunit pseudouridine synthase B |
| BT3873 | 1403 | asparaginyl-tRNA synthetase |
| BT3877 | 836 | 30S ribosomal protein S2 (BS1) |
| BT3878 | 992 | elongation factor Ts (EF-Ts) |
| BT3883 | 514 | 2-hydroxyhepta-2,4-diene-1,7-dioate isomerase |
| BT3917 | 908 | putative inorganic polyphosphate/ATP-NAD |
| | | kinase |
| BT3927 | 542 | hypothetical protein |
| BT3929 | 758 | triosephosphate isomerase |
| BT3931 | 590 | GTP cyclohydrolase I |
| BT3932 | 2192 | DNA primase |
| BT3943 | 563 | conserved hypothetical protein, putative |
| | | translation factor |
| BT3945 | 968 | methionyl-tRNA formyltransferase |
| BT3966 | 791 | two-component system response regulator |
| BT3995 | 2618 | alanyl-tRNA synthetase |
| BT3996 | 968 | putative peptidase |
| BT3998 | 2243 | GTP pyrophosphokinase |
| BT4000 | 887 | conserved hypothetical protein |
| BT4001 | 890 | putative chromosome partitioning protein parB |
| BT4004 | 1136 | lipid-A-disaccharide synthase |
| BT4006 | 842 | phosphatidate cytidylyltransferase |
| BT4007 | 2090 | AAA-metalloprotease FtsH, with ATPase domain |
| BT4011 | 860 | DNA-methyltransferase |
| BT4044 | 986 | putative dolichol-P-glucose synthetase |
| BT4046 | 1556 | hypothetical protein |
| BT4099 | 1943 | 1-deoxy-D-xylulose 5-phosphate synthase |
| BT4101 | 2321 | alanine racemase |
| BT4149 | 1058 | exo-poly-alpha-D-galacturonosidase precursor |
| BT4150 | 1238 | putative rhamnogalacturonan acetylesterase |
| BT4176 | 1397 | conserved hypothetical protein, putative |
| | | cytoplasmic protein |
| BT4210 | 1112 | peptide chain release factor 1 |
| BT4234 | 569 | similar to FimX |
| BT4253 | 431 | 6,7-dimethyl-8-ribityllumazine synthase |
| BT4263 | 1010 | glyceraldehyde 3-phosphate dehydrogenase |
| BT4271 | 707 | hypothetical protein |
| BT4293 | 1745 | hypothetical protein |
| BT4302 | 665 | putative transmembrane protein |
| BT4307 | 704 | putative glycogen synthase |
| BT4308 | 848 | pantoate--beta-alanine ligase |
| BT4312 | 1274 | seryl-tRNA synthetase |
| BT4321 | 800 | 2-dehydro-3-deoxyphosphooctonate aldolase |
| BT4322 | 926 | conserved hypothetical protein, with a |
| | | diacylglycerol kinase catalytic domain |
| BT4334 | 2495 | FtsK/SpoIIIE family protein |
| BT4335 | 647 | hypothetical protein |
| BT4353 | 2639 | valyl-tRNA synthetase |
| BT4356 | 1028 | putative anti-sigma factor |
| BT4362 | 3320 | preprotein translocase SecA subunit |
| BT4366 | 668 | putative transcription regulator |
| BT4375 | 1241 | transcriptional regulator |
| BT4376 | 527 | conserved hypothetical protein |
| BT4425 | 716 | deoxyribose-phosphate aldolase |
| BT4428 | 890 | conserved hypothetical protein |
| BT4449 | 1067 | putative dehydrogenase |
| BT4483 | 773 | hypothetical protein |
| BT4490 | 572 | hypothetical protein |
| BT4504 | 674 | hypothetical protein |
| BT4522 | 527 | Type I restriction-modification enzyme |
| BT4546 | 1073 | hypothetical protein |
| BT4571 | 560 | RNA polymerase ECF-type sigma factor |
| BT4588 | 569 | peptidyl-tRNA hydrolase |
| BT4594 | 614 | putative dephospho-CoA kinase |
| BT4615 | 1916 | chaperone protein dnaK |
| BT4637 | 1019 | putative inorganic phosphate transporter |
| BT4638 | 647 | hypothetical protein |
| BT4643 | 551 | RNA polymerase ECF-type sigma factor |
| BT4685 | 515 | conserved hypothetical protein |
| BT4709 | 941 | glycosyl hydrolase |
| BT4712 | 746 | conserved hypothetical protein |
| BT4748 | 1022 | Helicase-like |
| BT4780 | 899 | conserved protein found in conjugate transposon |

### V. Control Molecules

[0107] In certain embodiments, the control molecule is not regularly present in the human diet. In certain embodiments, the control molecule is a monosaccharide or a polysaccharide, for example, a marine polysaccharide or an antibiotic or a derivative of either. In certain embodiments, the marine polysaccharide is porphyran or agarose or a derivative thereof. In certain embodiments, the antibiotic or derivative thereof is anhydrotetracycline.

[0108] In certain embodiments, the control molecule is a molecule that is not part of a common diet of a given population, or one that is found in less than about 10%, 5%, 1%, 0.1%, 0.01%, or less than about 0.001% of guts of a given population. The given population may be described geographically, for example a control molecule may be one which is not a part of a traditional North American (European, South American, African, Asian, etc.) diet. The population may also be defined in other ways, for example a subpopulation. In some cases, a control molecule is not commonly found in the diet of a first population, though it may be common in the diet of a second population. In some embodiments, a rare carbohydrate is one that is found in less than 1%, 0.1%, 0.01%, or 0.001% of guts of a population . In some cases, the control molecule is a marine carbohydrate, for example porphyran or agarose. In some cases, the control molecule is a medication, for example an antibiotic or an antibiotic derivative such as tetracycline or anhydrotetracycline. In some cases, the control molecule is a halogenated carbohydrate, such as 1-chloro-1 -deoxy-D-fructose or 1,6-dichloro-1,6-dideoxy-D-fructose. In some cases, the control molecule is one that is lacking from the North American (European, South American, African, Asian, etc.) diet. In some cases, the control molecule is one that is consumed infrequently (e.g., less than 20 times a year, 10 times a year, 9 times a year, 8 times a year, 7 times a year, 6 times a year, 5 times a year, 4 times a year, 3 times a year), on average, in the North American (European, South American, African, Asian, etc.) diet. In some cases, the control molecule is non-naturally occurring. In some cases, the control molecule is present when the temperature of the environment is within a given range.

[0109] In certain embodiments, the control molecule is a porphyran and the first and second activator are each an HTCS protein, and (i) the porphyran, when present, activates the first and second HTCS proteins, (ii) the first and second HTCS proteins, when activated, activate the first and second promoters, respectively, and (iii) the first and second promoters, when activated, direct expression of the first and second essential genes, respectively, thereby resulting in the growth and/or viability of the bacterium being dependent upon the presence of the porphyran. In certain embodiments, the bacterium is a commensal bacterium.

### VI. Modified Bacteria

[0110] A contemplated modified bacterium, for example, for use in a disclosed pharmaceutical composition or method, includes Escherichia coli, Lactococcus lactis, members of the Bacteroidetes, Firmicute. Actinobacteria. Proteobacteria or Verrucomicrobia phylum, and a bacterium of genus Bacteroides, Alistipes, Faecalibacterium, Parabacteroides, Prevotella, Roseburia, Ruminococcus, Clostridium, Oscillibacter, Gemmiger, Barnesiella, Dialister, Parasutterella, Phascolarctobacterium, Propionibacterium, Sutterella, Blautia, Paraprevotella, Coprococcus, Odoribacter, Spiroplasma, Anaerostipes, or Akkermansia. A contemplated bacterium, for example, for use in a disclosed pharmaceutical composition or method, may be of the Bacteroides genus, i.e., may be a Bacteroides species bacterium.

[0111] Exemplary Bacteroides species include B. acidifaciens, B. amylophilus, B. asaccharolyticus, B. barnesiaes, B. bivius, B. buccae, B. buccalis, B. caccae, B. caecicola, B. caecigallinarum, B. capillosus, B. capillus, B. cellulosilyticus, B. cellulosolvens, B. chinchilla, B. clarus, B. coagulans, B. coprocola, B. coprophilus, B. coprosuis, B. corporis, B. denticola, B. disiens, B. distasonis, B. dorei, B. eggerthii, B. endodontalis, B. faecichinchillae, B. faecis, B. finegoldii, B. fluxus, B. forsythus, B. fragilis, B. furcosus, B. galacturonicus, B. gallinaceum, B. gallinarum, B. gingivalis, B. goldsteinii, B. gracilis, B. graminisolvens, B. helcogenes, B. heparinolyticus, B. hypermegas, B. intermedius, B. intestinalis, B. johnsonii, B. levvi, B. loescheii, B. luti, B. macacae, B. massiliensis, B. melaninogenicus, B. merdae, B. microfusus, B. multiacidus, B. nodosus, B. nordii, B. ochraceus, B. oleiciplenus, B. oralis, B. oris, B. oulorum, B. ovatus, B. paurosaccharolyticus, B. pectinophilus, B. pentosaceus, B. plebeius, B. pneumosintes, B. polypragmatus, B. praeacutus, B. propionicifaciens, B. putredinis, B. pyogenes, B. reticulotermitis, B. rodentium, B. ruminicola, B. salanitronis, B. salivosus, B. salyersiae, B. sartorii, B. sediment, B. splanchnicus, B. stercorirosoris, B. stercoris, B. succinogenes, B. suis, B. tectus, B. termitidis, B. thetaiotaomicron, B. uniformis, B. ureolyticus, B. veroralis, B. vulgatus, B. xylanisolvens, B. xylanolyticus, or B. zoogleofonnans.

[0112] As used herein, the term “species” refers to a taxonomic entity as conventionally defined by genomic sequence and phenotypic characteristics. A “strain” is a particular instance of a species that has been isolated and purified according to conventional microbiological techniques. The present disclosure encompasses derivatives of the disclosed bacterial strains. The term “derivative” includes daughter strains (progeny) or stains cultured (sub-cloned) from the original but modified in some way (including at the genetic level), without altering negatively a biological activity of the strain.

[0113] In certain embodiments, a contemplated modified bacterium is of a genus that makes up more than 0.1%, 0.5%, 1%, 5%, 10%, 20%, 30%, or 40% of the total culturable microbes in the feces of a subject to be treated, or in the feces of an average human. In certain embodiments, a contemplated modified bacterium is of a genus that is detected at a level greater than 10¹², 10¹¹, 10¹⁰, 10⁹, 10⁸, 10⁷ colony forming units per gram of feces of a subject to be treated, or per gram of feces of an average human. In certain embodiments, a contemplated modified bacterium is of a genus that makes up more than 0.1%, 0.5%, 1%, 5%, 10%, 20%, 30%, or 40% of the gut microbiome of a subject to be treated, or of the gut microbiome of an average human. Human gut or feces microbiome composition may be assayed by any technique known in the art, including 16S ribosomal sequencing. Bacteroidesis the most naturally abundant genus in the human gut (Huttenhower et al. (2012) NATURE 486.7402:207).

[0114] rRNA, 16S rDNA, 16S rRNA, 16S, 18S, 18S rRNA, and 18S rDNA refer to nucleic acids that are components of, or encode for, components of the ribosome. There are two subunits in the ribosome termed the small subunit (SSU) and large subunit (LSU). rDNA genes and their complementary RNA sequences are widely used for determination of the evolutionary relationships amount organisms as they are variable, vet sufficiently conserved to allow cross- organism molecular comparisons.

[0115] 16S rDNA sequence (approximately 1542 nucleotides in length) of the 30S SSU can be used, in embodiments, for molecular-based taxonomic assignments of prokaryotes and the 18S rDNA sequence (approximately 1869 nucleotides in length) of 40S SSU may be used for eukaryotes. For example, 16S sequences may be used for phylogenetic reconstruction as they are general highly conserved but contain specific hypervariable regions that harbor sufficient nucleotide diversity to differentiate genera and species of most bacteria. Although 16S rDNA sequence data has been used to provide taxonomic classification, closely related bacterial strains that are classified within the same genus and species, may exhibit distinct biological phenotypes.

[0116] The identity of contemplated bacterial species or strains may be characterized by 16S rRNA or full genome sequence analysis. For example, in certain embodiments, contemplated bacterial strains may comprise a 16S rRNA or genomic sequence having a certain % identity to a reference sequence.

[0117] Sequence identity may be determined in various ways that are within the skill in the art, e.g., using publicly available computer software such as BLAST, BLAST-2, ALIGN or Megalign (DNASTAR) software. BLAST (Basic Local Alignment Search Tool) analysis using the algorithm employed by the programs blastp, blastn, blastx, tblastn and tblastx (Karlin et al., (1990) PROC. NATL. ACAD. SCI. USA 87:2264-2268; Altschul, (1993) J. MOL. EVOL. 36, 290-300; Altschul et al., (1997) NUCLEIC ACIDS RES. 25:3389-3402, incorporated by reference) are tailored for sequence similarity searching. For a discussion of basic issues in searching sequence databases see Altschul et al., (1994) NATURE GENETICS 6:119-129, which is fully incorporated by reference. Those skilled in the art can determine appropriate parameters for measuring alignment, including any algorithms needed to achieve maximal alignment over the full length of the sequences being compared. The search parameters for histogram, descriptions, alignments, expect (i.e., the statistical significance threshold for reporting matches against database sequences), cutoff, matrix and filter are at the default settings. The default scoring matrix used by blastp, blastx, tblastn, and tblastx is the BLOSUM62 matrix (Henikoff et al., (1992) PROC. NATL. ACAD. SCI. USA 89:10915-10919, fully incorporated by reference). Four blastn parameters may be adjusted as follows: Q=10 (gap creation penalty); R=10 (gap extension penalty); wink=1 (generates word hits at every wink.sup.th position along the query); and gapw=16 (sets the window width within which gapped alignments are generated). The equivalent Blastp parameter settings may be Q=9; R=2; wink=1; and gapw=32. Searches may also be conducted using the NCBI (National Center for Biotechnology Information) BLAST Advanced Option parameter (e.g.: -G, Cost to open gap [Integer]: default=5 for nucleotides/11 for proteins; -E, Cost to extend gap [Integer]: default=2 for nucleotides/1 for proteins; -q, Penalty for nucleotide mismatch [Integer]: default=−3; -r, reward for nucleotide match [Integer]: default=1; -e, expect value [Real]: default=10; -W, wordsize [Integer]: default=11 for nucleotides/28 for megablast/3 for proteins; -y, Dropoff (X) for blast extensions in bits: default=20 for blastn/7 for others; -X, X dropoff value for gapped alignment (in bits): default=15 for all programs, not applicable to blastn; and -Z, final X dropoff value for gapped alignment (in bits): 50 for blastn, 25 for others). ClustalW for pairwise protein alignments may also be used (default parameters may include, e.g., Blosum62 matrix and Gap Opening Penalty=10 and Gap Extension Penalty=0.1). A Bestfit comparison between sequences, available in the GCG package version 10.0, uses DNA parameters GAP=50 (gap creation penalty) and LEN=3 (gap extension penalty) and the equivalent settings in protein comparisons are GAP=8 and LEN=2.

[0118] In certain embodiments, a contemplated modified bacterium is capable of stably colonizing the human gut. A disclosed bacterium may, e.g., upon administration to a human subject, result in an abundance greater than 10¹², 10¹¹, 10¹⁰, 10⁹, 10⁸, or 10⁷ cfu per gram of fecal content. For example, administration of about 10³, about 10⁴, about 10⁵, about 10⁶, about 10⁷, about 10⁸, about 10⁹, about 10¹⁰, about 10¹¹, or about 10¹² cells of a disclosed bacterium to a human subject may result in an abundance greater than 10¹², 10¹¹, 10¹⁰, 10⁹, 10⁸, or 10⁷ cfu per gram of fecal content with 12 hours, 24 hours, 36 hours, 48 hours, 60 hours, or 72 hours of administration.

[0119] A disclosed bacterium may, e.g., have been modified to colonize the human gut with increased abundance, stability, predictability or ease of initial colonization relative to a similar or otherwise identical bacterium that has not been modified. For example, a contemplated bacterium may be modified to increase its ability to utilize a privileged nutrient as carbon source. A “privileged nutrient” is defined as a molecule or set of molecules that can be consumed to aid in the proliferation of a particular bacterial strain while providing proliferation assistance to no more than 1% of the other bacteria in the gut. Accordingly, in certain embodiments, a modified bacterium has the ability to consume the privileged nutrient to sustain its colonization and expand in the gut of a subject to a predictably high abundance, even in the absence of other carbon or energy sources, while most other bacteria in the gut of the subject do not. Exemplary privileged nutrients include, e.g., a marine polysaccharide, e.g., a porphyran. As the skilled artisan will recognize, contemplated privileged nutrients may overlap with contemplated control molecules for a given bacterium and subject.

[0120] For example, in certain embodiments, a bacterium may comprise all or a portion of a polysaccharide utilization locus (PUL), a mobile genetic element that confers the ability to consume a carbohydrate, e.g., a privileged nutrient, upon a bacterium. An exemplary porphyran consumption PUL is the PUL from the porphyran-consuming Bacteroides strain NB001 depicted in SEQ ID NO: 14. Accordingly, in certain embodiments, a modified bacterium comprises SEQ ID NO: 14, or a functional fragment or variant thereof. In certain embodiments, a modified bacterium comprises a nucleotide sequence having at least 80%, 85%, 86%, 87%, 88%, 89%, 90%, 91%, 92%, 93%, 94%, 95%, 96%, 97%, 98%, or 99% identity to SEQ ID NO: 14, or a functional fragment or variant thereof.

[0121] Other exemplary PULs are those from the agarose-consuming Bacteroides strain NB002 provided in SEQ ID NO: 15 and NB003 provided in SEQ ID NO: 16. Accordingly, in certain embodiments, a modified bacterium comprises SEQ ID NO: 15 or 16, or a functional fragment or variant thereof. In certain embodiments, a modified bacterium comprises a nucleotide sequence having at least 80%, 85%, 86%, 87%, 88%, 89%, 90%, 91%, 92%, 93%, 94%, 95%, 96%, 97%, 98%, or 99% identity to SEQ ID NO: 15 or 16, or a functional fragment or variant thereof.

[0122] Additional exemplary bacterial modifications to increase abundance in the gut of a subject, privileged nutrients, transgenes that increase the ability of a bacterium to utilize a privileged nutrient. PULs, and other methods and compositions for modulating the growth of a modified bacterium are described in International (PCT) Patent Publication No. WO2018112194.

[0123] In certain embodiments, a disclosed transgene or nucleic acid comprising an heterologous nucleotide sequence is operably linked to at least one promoter, e.g., a phage-derived promoter. The term “operably linked” refers to a linkage of polynucleotide elements in a functional relationship. A nucleic acid sequence is “operably linked” when it is placed into a functional relationship with another nucleic acid sequence. For instance, a promoter or enhancer is operably linked to a gene if it affects the transcription of the gene. Operably linked nucleotide sequences are typically contiguous. However, as enhancers generally function when separated from the promoter by several kilobases and intronic sequences may be of variable lengths, some polynucleotide elements may be operably linked but not directly flanked and may even function in trans from a different allele or chromosome. In certain embodiments, the promoter comprises the consensus sequence GTTAA(n)₄₋₇GTTAA(n)₃₄₋₃₈TA(n)₂TTTG. In certain embodiments, the promoter comprises SEQ ID NO: 48, SEQ ID NO: 49, or SEQ ID NO: 50, or a functional fragment thereof, or a nucleotide sequence having at least 80%, 85%, 86%, 87%, 88%, 89%, 90%, 91%, 92%, 93%, 94%, 95%, 96%, 97%, 98%, or 99% identity to SEQ ID NO: 48, SEQ ID NO: 49, or SEQ ID NO: 50, or a functional fragment thereof. Additional exemplary phage-derived promoters are described in International (PCT) Patent Publication No. WO2017184565.

[0124] In certain embodiments, the bacterium further comprising one or more transgenes encoding a protein homologous to a starch binding protein such as SusC or SusD, e.g., SEQ ID NO: 20 or 21, or a functional fragment or variant thereof. In certain embodiments, the transgene encodes one or more of SEQ ID NO: 20 and 21, or a functional fragment thereof, or a protein having at least 80%, 85%, 86%, 87%, 88%, 89%, 90%, 91%, 92%, 93%, 94%, 95%, 96%, 97%, 98%, or 99% identity to SEQ ID NO: 20 or 21, or a functional fragment thereof.

[0125] In certain embodiments, the bacterium further comprises a therapeutic transgene. In some cases, the therapeutic transgene may be gad65, il10, il22, TNF-α, nags, add, xapA, deoD, xdhA, xdhB, xdhC, mtr, a propionate transporter, a kynurenine transporter, a bile salt transporter, an ammonia transporter, a GABA transporter, PheP or AroP. In some cases, the bacterium comprises a diagnostic transgene. In some cases, the diagnostic transgene is TtrR/TtrS. In some cases, the bacterium further comprises an outer membrane import protein.

[0126] In certain embodiments, a disclosed transgene or nucleic acid is on a plasmid, on a bacterial artificial chromosome, and/or are genomically integrated. When a bacterium comprises one or more transgenes or nucleic acids encoding multiple proteins, it is contemplated that the open reading frames encoding two or more of the proteins may, e.g., be present in a single operon.

[0127] In certain embodiments, a disclosed gene (e.g., essential gene or transgene) or nucleic acid is operably linked to at least one ribosome binding site (RBS). Exemplary RBSs include those comprising the nucleotide sequence of any one of SEQ ID NOs: 47, 74, 75, 76, 77, 84, or 85, or a nucleotide sequence having at least 80%, 85%, 86%, 87%, 88%, 89%, 90%, 91%, 92%, 93%, 94%, 95%, 96%, 97%, 98%, or 99% identity to any one of SEQ ID NOs: 47, 74, 75, 76, 77, 84, or 85, or a functional fragment or variant of any of the foregoing nucleotide sequences.

[0128] It is contemplated that a bacterium may comprise a nucleic acid comprising the nucleotide sequence of any one of SEQ ID NOs: 47, 74, 75, 76, 77, 84, or 85, or a functional fragment or variant thereof, or a nucleotide sequence having at least 80%, at least 85%, at least 90%, at least 91%, at least 92%, at least 93%, at least 94%, at least 95%, at least 96%, at least 97%, at least 98%, or at least 99% identity to any one of SEQ ID NOs: 47, 74, 75, 76, 77, 84, or 85, or a functional fragment or variant thereof.

[0129] It is contemplated that a bacterium may comprise a protein comprising the amino acid sequence of any one of SEQ ID NOs: 39, 43, 53, 54, 59, or 64-71, or a functional fragment or variant thereof, or an amino acid sequence having at least 80%, at least 85%, at least 90%, at least 91%, at least 92%, at least 93%, at least 94%, at least 95%, at least 96%, at least 97%, at least 98%, or at least 99% identity to any one of SEQ ID NOs: 39, 43, 53, 54, 59, or 64-71, or a functional fragment or variant thereof.

[0130] It is contemplated that a bacterium may comprise one or more nucleic acids comprising a nucleotide sequence encoding the amino acid sequence of any one of SEQ ID NOs: 39, 43, 53, 54, 59, or 64-71, or a functional fragment or variant thereof, or an amino acid sequence having at least 80%, at least 85%, at least 90%, at least 91%, at least 92%, at least 93%, at least 94%, at least 95%, at least 96%, at least 97%, at least 98%, or at least 99% identity to any one of SEQ ID NOs: 39, 43, 53, 54, 59, or 64-71, or a functional fragment or variant thereof.

[0131] It is contemplated that a bacterium may comprise one or more nucleic acids comprising the nucleotide sequence of any one of SEQ ID NOs: 29, 30, 31, 34, 35, 36, 37, 40, 55, 56, 60, 61, or 72, or a functional fragment or variant thereof, or a nucleotide sequence having at least 80%, at least 85%, at least 90%, at least 91%, at least 92%, at least 93%, at least 94%, at least 95%, at least 96%, at least 97%, at least 98%, or at least 99% identity to any one of SEQ ID NOs: 29, 30, 31, 34, 35, 36, 37, 40, 55, 56, 60, 61, or 72, or a functional fragment or variant thereof.

[0132] It is contemplated that a bacterium may comprise (i) an HTCS that is activated by porphyran comprising the amino acid of SEQ ID NO: 19, or a functional fragment or variant thereof, or an amino acid sequence having at least 80%, at least 85%, at least 90%, at least 91%, at least 92%, at least 93%, at least 94%, at least 95%, at least 96%, at least 97%, at least 98%, or at least 99% identity to SEQ ID NO: 19, or a functional fragment or variant thereof; (ii) a promoter that is activated by the HTCS comprising the nucleotide sequence of SEQ ID NO: 73, or a functional fragment or variant thereof, or a nucleotide sequence having at least 80%, at least 85%, at least 90%, at least 91%, at least 92%, at least 93%, at least 94%, at least 95%, at least 96%, at least 97%, at least 98%, or at least 99% identity to SEQ ID NO: 73, or a functional fragment or variant thereof; and (iii) an essential gene (e.g., an argS gene) that is operably linked to the promoter. In certain embodiments, the essential gene (e.g., the argS gene) is operably linked to a ribosome binding site (RBS) comprising the nucleotide sequence of SEQ ID NO: 47, or a functional fragment or variant thereof, or a nucleotide sequence having at least 80%, at least 85%, at least 90%, at least 91%, at least 92%, at least 93%, at least 94%, at least 95%, at least 96%, at least 97%, at least 98%, or at least 99% identity to SEQ ID NO: 47, or a functional fragment or variant thereof.

[0133] It is contemplated that a bacterium may comprise (i) an HTCS that is activated by porphyran comprising the amino acid of SEQ ID NO: 59, or a functional fragment or variant thereof, or an amino acid sequence having at least 80%, at least 85%, at least 90%, at least 91%, at least 92%, at least 93%, at least 94%, at least 95%, at least 96%, at least 97%, at least 98%, or at least 99% identity to SEQ ID NO: 59, or a functional fragment or variant thereof; (ii) a promoter that is activated by the HTCS comprising the nucleotide sequence of SEQ ID NO: 45, or a functional fragment or variant thereof, or a nucleotide sequence having at least 80%, at least 85%, at least 90%, at least 91%, at least 92%, at least 93%, at least 94%, at least 95%, at least 96%, at least 97%, at least 98%, or at least 99% identity to SEQ ID NO: 45, or a functional fragment or variant thereof; and (iii) an essential gene (e.g., a lytB gene) that is operably linked to the promoter. In certain embodiments, the essential gene (e.g., the lytB gene) is operably linked to a ribosome binding site (RBS) comprising the nucleotide sequence of SEQ ID NO: 84, or a functional fragment or variant thereof, or a nucleotide sequence having at least 80%, at least 85%, at least 90%, at least 91%, at least 92%, at least 93%, at least 94%, at least 95%, at least 96%, at least 97%, at least 98%, or at least 99% identity to SEQ ID NO: 84, or a functional fragment or variant thereof.

[0134] It is contemplated that a bacterium may comprise (i) a first HTCS that is activated by porphyran comprising the amino acid of SEQ ID NO: 19, or a functional fragment or variant thereof, or an amino acid sequence having at least 80%, at least 85%, at least 90%, at least 91%, at least 92%, at least 93%, at least 94%, at least 95%, at least 96%, at least 97%, at least 98%, or at least 99% identity to SEQ ID NO: 19, or a functional fragment or variant thereof; (ii) a first promoter that is activated by the first HTCS comprising the nucleotide sequence of SEQ ID NO: 73, or a functional fragment or variant thereof, or a nucleotide sequence having at least 80%, at least 85%, at least 90%, at least 91%, at least 92%, at least 93%, at least 94%, at least 95%, at least 96%, at least 97%, at least 98%, or at least 99% identity to SEQ ID NO: 73, or a functional fragment or variant thereof; (iii) a first essential gene (e.g., an argS gene) that is operably linked to the first promoter; (iv) a second HTCS that is activated by porphyran comprising the amino acid of SEQ ID NO: 59, or a functional fragment or variant thereof, or an amino acid sequence having at least 80%, at least 85%, at least 90%, at least 91%, at least 92%, at least 93%, at least 94%, at least 95%, at least 96%, at least 97%, at least 98%, or at least 99% identity to SEQ ID NO: 59, or a functional fragment or variant thereof; (v) a second promoter that is activated by the second HTCS comprising the nucleotide sequence of SEQ ID NO: 45, or a functional fragment or variant thereof, or a nucleotide sequence having at least 80%, at least 85%, at least 90%, at least 91%, at least 92%, at least 93%, at least 94%, at least 95%, at least 96%, at least 97%, at least 98%, or at least 99% identity to SEQ ID NO: 45, or a functional fragment or variant thereof; and (vi) a second essential gene (e.g., a lytB gene) that is operably linked to the second promoter. In certain embodiments, the first essential gene (e.g., the argS gene) is operably linked to a first ribosome binding site (RBS) comprising the nucleotide sequence of SEQ ID NO: 47, or a functional fragment or variant thereof, or a nucleotide sequence having at least 80%, at least 85%, at least 90%, at least 91%, at least 92%, at least 93%, at least 94%, at least 95%, at least 96%, at least 97%, at least 98%, or at least 99% identity to SEQ ID NO: 47, or a functional fragment or variant thereof. In certain embodiments, the second essential gene (e.g., the lytB gene) is operably linked to a second ribosome binding site (RBS) comprising the nucleotide sequence of SEQ ID NO: 84, or a functional fragment or variant thereof, or a nucleotide sequence having at least 80%, at least 85%, at least 90%, at least 91%, at least 92%, at least 93%, at least 94%, at least 95%, at least 96%, at least 97%, at least 98%, or at least 99% identity to SEQ ID NO: 84, or a functional fragment or variant thereof.

### VII. Methods

[0135] In another aspect, the disclosure relates to a method for reducing the growth and/or viability of a bacterium (e.g., a commensal bacterium) in the absence of a control molecule. The method includes genetically modifying the bacterium to comprise a first activator that is activated by the control molecule, a first promoter that is activated by the first activator, and a first essential gene that is operably linked to the first promoter. In certain embodiments, the method further includes genetically modifying the bacterium to comprise a second activator that is activated by the control molecule, a second promoter that is activated by the second activator, and a second essential gene that is operably linked to the second promoter. In certain embodiments, the first promoter is not activated by the second activator and the second promoter is not activated by the first activator. Incorporating different activator/promoter pairs that do not cross-activate provides redundancy and reduces the escape rate.

[0136] Accordingly, to further reduce the growth and/or viability of a bacterium in the absence of a control molecule, a third activator that is activated by the control molecule may be introduced. Thus, the method can further include genetically modifying the bacterium to comprise a third activator that is activated by the control molecule, a third promoter that is activated by the third activator, and a third essential gene that is operably linked to the third promoter. In certain embodiments, the third promoter is not activated by the first or second activator and the third promoter is not activated by the first or second activator. Incorporating additional activator/promoter pairs provides additional redundancy and further reduces the escape rate.

[0137] In certain embodiments, the method further includes genetically modifying the bacterium to comprise one or more transgenes encoding the first, second, and/or third activator.

[0138] The disclosure also relates to a method of colonizing the gut of a subject, the method comprising administering the bacterium or the pharmaceutical composition as described herein. Strategies for increasing colonization of the gut are discussed in more detail below.

### VIII. Pharmaceutical Compositions/Units

[0139] A bacterium disclosed herein may be combined with pharmaceutically acceptable excipients to form a pharmaceutical composition, which can be administered to a patient by any means known in the art. As used herein, the term “pharmaceutically acceptable excipient” is understood to mean one or more of a buffer, carrier, or excipient suitable for administration to a subject, for example, a human subject, without excessive toxicity, irritation, allergic response, or other problem or complication, commensurate with a reasonable benefit/risk ratio. The excipient(s) should be “acceptable” in the sense of being compatible with the other ingredients of the formulations and not deleterious to the recipient.

[0140] Pharmaceutically acceptable excipients include buffers, solvents, dispersion media, coatings, isotonic and absorption delaying agents, and the like, that are compatible with pharmaceutical administration. Pharmaceutically acceptable excipients also include fillers, binders, disintegrants, glidants, lubricants, and any combination(s) thereof. For further examples of excipients, carriers, stabilizers and adjuvants, see, e.g., Handbook of Pharmaceutical Excipients, 8^{th} Ed., Edited by P. J. Sheskey, W. G. Cook, and C. G. Cable, Pharmaceutical Press, London, UK [2017]. The use of such media and agents for pharmaceutically active substances is known in the art.

[0141] Contemplated bacteria may be used in disclosed compositions in any form, e.g., a stable form, as known to those skilled in the art, including in a lyophilized state (with optionally one or more appropriate cryoprotectants), frozen (e.g., in a standard or super-cooled freezer), spray dried, and/or freeze dried. A “stable” formulation or composition is one in which the biologically active material therein essentially retains its physical stability, chemical stability, and/or biological activity upon storage. Stability can be measured at a selected temperature and humidity conditions for a selected time period. Trend analysis can be used to estimate an expected shelf life before a material has actually been in storage for that time period. For live bacteria, for example, stability may be defined as the time it takes to lose 1 log of cfu/g dry formulation under predefined conditions of temperature, humidity and time period.

[0142] A bacterium disclosed herein may be combined with one or more cryoprotectants. Exemplary cryoprotectants include fructoligosaccharides (e.g., raftilose®), trehalose, maltodextrin, sodium alginate, proline, glutamic acid, glycine (e.g., glycine betaine), mono-, di-, or polysaccharides (such as glucose, sucrose, maltose, lactose), polyols (such as mannitol, sorbitol, or glycerol), dextran, DMSO, methylcellulose, propylene glycol, polyvinylpyrrolidone, non-ionic surfactants such as Tween 80, and/or any combinations thereof.

[0143] A pharmaceutical composition should be formulated to be compatible with its intended route of administration. Contemplated bacterial compositions disclosed herein can be prepared by any suitable method and can be formulated into a variety of forms and administered by a number of different means. Contemplated compositions can be administered orally, rectally, or enterally, in formulations containing conventionally acceptable carriers, adjuvants, and vehicles as desired. As used herein, “rectal administration” is understood to include administration by enema, suppository. or colonoscopy. A disclosed pharmaceutical composition may, e.g., be suitable for bolus administration or bolus release. In an exemplary embodiment, a disclosed bacterial composition is administered orally.

[0144] Solid dosage forms for oral administration include capsules, tablets, caplets, pills, troches, lozenges, powders, and granules. A capsule typically comprises a core material comprising a bacterial composition and a shell wall that encapsulates the core material. In some embodiments the core material comprises at least one of a solid, a liquid, and an emulsion. In some embodiments the shell wall material comprises at least one of a soft gelatin, a hard gelatin, and a polymer. Suitable polymers include, but are not limited to: cellulosic polymers such as hydroxypropyl cellulose, hydroxyethyl cellulose, hydroxypropyl methyl cellulose (HPMC), methyl cellulose, ethyl cellulose, cellulose acetate, cellulose acetate phthalate, cellulose acetate trimellitate, hydroxypropylmethyl cellulose phthalate, hydroxypropylmethyl cellulose succinate and carboxymethylcellulose sodium; acrylic acid polymers and copolymers, such as those formed from acrylic acid, methacry lic acid, methyl acrylate, ammonio methylacrylate, ethyl acrylate, methyl methacrylate and/or ethyl methacry late (e.g., those copolymers sold under the trade name “Eudragit®”); vinyl polymers and copolymers such as polyvinyl pyrrolidone, polyvinyl acetate, polyvinylacetate phthalate, vinylacetate crotonic acid copolymer, and ethylene-vinyl acetate copolymers; and shellac (purified lac). In some embodiments at least one polymer functions as a taste-masking agent.

[0145] Tablets, pills, and the like can be compressed, multiply compressed, multiply layered, and/or coated. A contemplated coating can be single or multiple. In one embodiment, a contemplated coating material comprises at least one of a saccharide, a polysaccharide, and glycoproteins extracted from at least one of a plant, a fungus, and a microbe. Non-limiting examples include corn starch, wheat starch, potato starch, tapioca starch, cellulose, hemicellulose, dextrans, maltodextrin, cyclodextrins, inulins, pectin, mannans, gum arabic, locust bean gum, mesquite gum, guar gum, gum karaya, gum ghatti, tragacanth gum, funori, carrageenans, porphyrans, agar, alginates, chitosans, or gellan gum. In some embodiments a contemplated coating material comprises a protein. In some embodiments a contemplated coating material comprises at least one of a fat and an oil. In some embodiments the at least one of a fat and an oil is high temperature melting. In some embodiments the at least one of a fat and an oil is hydrogenated or partially hydrogenated. In some embodiments the at least one of a fat and an oil is derived from a plant. In some embodiments the at least one of a fat and an oil comprises at least one of glycerides, free fatty acids, and fatty acid esters. In some embodiments a contemplated coating material comprises at least one edible wax. A contemplated edible wax can be derived from animals, insects, or plants. Non-limiting examples include beeswax, lanolin, bayberry wax, carnauba wax, and rice bran wax. Tablets and pills can additionally be prepared with enteric or reverse-enteric coatings.

[0146] Alternatively, powders or granules embodying a bacterial composition disclosed herein can be incorporated into a food product. In some embodiments a contemplated food product is a drink for oral administration. Non-limiting examples of a suitable drink include water, fruit juice, a fruit drink, an artificially flavored drink, an artificially sweetened drink, a carbonated beverage, a sports drink, a liquid diary product, a shake, an alcoholic beverage, a caffeinated beverage, infant formula and so forth. Other suitable means for oral administration include aqueous and nonaqueous solutions, emulsions, suspensions and solutions and/or suspensions reconstituted from non-effervescent granules, containing at least one of suitable solvents, preservatives, emulsifying agents, suspending agents, diluents, sweeteners, coloring agents, and flavoring agents.

[0147] Pharmaceutical compositions containing a bacterium disclosed herein can be presented in a unit dosage form, i.e .. a pharmaceutical unit. A composition, e.g., a pharmaceutical unit provided herein, may include any appropriate amount of bacterium, measured either by total mass or by colony forming units of the bacteria.

[0148] For example, a disclosed pharmaceutical composition or unit may include from about 10³ cfus to about 10¹² cfus, about 10⁶ cfus to about 10¹² cfus, about 10⁷ cfus to about 10¹² cfus, about 10⁸ cfus to about 10¹² cfus, about 10⁹ cfus to about 10¹² cfus, about 10¹⁰ cfus to about 10¹² cfus, about 10¹¹ cfus to about 10¹² cfus, about 10³ cfus to about 10¹¹ cfus, about 10⁶ cfus to about 10¹¹ cfus, about 10⁷ cfus to about 10¹¹ cfus, about 10⁸ cfus to about 10¹¹ cfus, about 10⁹ cfus to about 10¹¹ cfus, about 10¹⁰ cfus to about 10¹¹ cfus, about 10³ cfus to about 10¹⁰ cfus, about 10⁶ cfus to about 10¹⁰ cfus, about 10⁷ cfus to about 10¹⁰ cfus, about 10⁸ cfus to about 10¹⁰ cfus, about 10⁹ cfus to about 10¹⁰ cfus, about 10³ cfus to about 10⁹ cfus, about 10⁶ cfus to about 10⁹ cfus, about 10⁷ cfus to about 10⁹ cfus, about 10⁸ cfus to about 10⁹ cfus, about 10³ cfus to about 10⁸ cfus, about 10⁶ cfus to about 10⁸ cfus, about 10⁷ cfus to about 10⁸ cfus, about 10³ cfus to about 10⁷ cfus, about 10⁶ cfus to about 10⁷ cfus, or about 10³ cfus to about 10⁶ cfus of each bacterial strain, or may include about 10³ cfus, about 10⁶ cfus, about 10⁷ cfus, about 10⁸ cfus, about 10⁹ cfus, about 10¹⁰ cfus, about 10¹¹ cfus, or about 10¹² cfus of bacteria.

[0149] In certain embodiments, the pharmaceutical compositions or unit may further comprise a control molecule. In certain embodiments, the pharmaceutical compositions comprises the control molecule in an amount sufficient to preserve viability of the bacterium when administered to a subject. For example, the control molecule may be present in an amount from about 10 mg to about 100 g per dose. In certain embodiments, the control molecule may be present in an amount from about 10 mg to about 10 g per dose, from about 10 mg to about 1 g per dose, from about 10 mg to about 100 mg per dose, from about 100 mg to about 1 g per dose, from about 100 mg to about 10 g per dose, from about 100 mg to about 100 g per dose, from about 100 mg to about 100 g per dose, from about 1 g to about 10 g per dose, from about 1 g to about 100 g per dose, or from about 10 g to about 100 g per dose.

### IX. Therapeutic Uses

[0150] In some embodiments, this disclosure provides a method of treating a subject with a disease or disorder, comprising: administering to the subject a bacterium engineered to require a control molecule for viability. The bacterium may express a therapeutic transgene. The bacterium may be maintained in the subject by administration of a control molecule to the subject for a sufficient time to treat the disease or disorder.

[0151] In some embodiments a method of diagnosing or monitoring a subject with a disease or disorder, may comprise: administering to the subject a bacterium engineered to require a control molecule for viability. The bacterium may express a diagnostic transgene and be maintained in the subject by administration of a control molecule to the subject for a sufficient time to diagnose or monitor the disease or disorder. In some cases, the bacterium may be incapable of person to person transmission, or organism to organism transmission. The control molecule and the bacterium may be administered to the subject orally. In some cases, the subject is a human. In some examples, the control molecule bacterium cannot be detected in the subject at least one day, two days, three days, four days, one week, or two weeks after a last administration.

[0152] As used herein, “treat”, “treating” and “treatment” mean the treatment of a disease in a subject, e.g., in a human. This includes: (a) inhibiting the disease, i.e., arresting its development; and (b) relieving the disease, i.e., causing regression of the disease state. As used herein, the terms “subject” and “patient” refer to a bacterium to be treated by the methods and compositions described herein. Such organisms preferably include, but are not limited to, mammals. e.g., human, a companion animal (e.g., dog, cat, or rabbit), or a livestock animal (for example, cow, sheep, pig, goat, horse, donkey, and mule, buffalo, oxen, or camel).

[0153] It will be appreciated that the exact dosage of a pharmaceutical composition, or bacterium is chosen by an individual physician in view of the patient to be treated, in general, dosage and administration are adjusted to provide an effective amount of the bacterial agent to the patient being treated. As used herein, the “effective amount” refers to the amount necessary to elicit a beneficial or desired biological response. An effective amount can be administered in one or more administrations, applications or dosages and is not intended to be limited to a particular formulation or administration route. As will be appreciated by those of ordinary skill in this art, the effective amount of a pharmaceutical unit, pharmaceutical composition, or bacterial strain may vary depending on such factors as the desired biological endpoint, the drug to be delivered, the target tissue, the route of administration, etc. Additional factors which may be taken into account include the severity of the disease state; age, weight and gender of the patient being treated; diet, time and frequency of administration; drug combinations; reaction sensitivities; and tolerance/response to therapy.

[0154] Contemplated methods may further comprise administrating a control molecule and/or a privileged nutrient to the subject to support colonization of the bacterium. Exemplary privileged nutrients include marine polysaccharides, e.g., a porphyran. For example, a disclosed privileged nutrient may be administered to the subject prior to, at the same time as, or after a disclosed bacterium.

[0155] Contemplated methods may comprise administration of a disclosed bacterium or pharmaceutical composition to a subject every 12 hours, 24 hours, day, 2 days, 3 days, 4 days, 5 days, 6 days, 7 days, week, 2 weeks, 3 weeks, 4 weeks, month, 2 months, 3 months, 4 months, 5 months, or 6 months. In certain embodiments, the time between consecutive administrations of a disclosed bacterium or pharmaceutical composition to a subject is greater than 12 hours, 24 hours, 36 hours, 48 hours, 2 days, 3 days, 4 days, 5 days, 6 days, 7 days, 1 week, 2 weeks, 3 weeks, or 4 weeks.

[0156] In certain embodiments, a disclosed bacterium and a disclosed control molecule and/or privileged nutrient, e.g., a marine polysaccharide, e.g., a porphyran are administered to a subject with the same frequency. For example, the bacterium and the privileged nutrient may both be administered to the subject every 8 hours, 12 hours, 24 hours, day, 2 days, 3 days, 4 days, 5 days, 6 days, 7 days, week, 2 weeks, 3 weeks, 4 weeks, month, 2 months, 3 months, 4 months, 5 months, or 6 months. In certain embodiments, a disclosed bacterium and a disclosed control molecule and/or privileged nutrient, e.g., a marine polysaccharide, e.g., a porphyran, are administered to a subject with a different frequency. For example, the bacterium may be administered to the subject every 8 hours, 12 hours, 24 hours, day, 2 days, 3 days, 4 days, 5 days, 6 days, 7 days, week, 2 weeks, 3 weeks, 4 weeks, month, 2 months, 3 months, 4 months, 5 months, or 6 months, and the control molecule and/or privileged nutrient may be administered to the subject every 8 hours, 12 hours, 24 hours, day, 2 days, 3 days, 4 days, 5 days, 6 days, 7 days, week, 2 weeks, 3 weeks, 4 weeks, month, 2 months, 3 months, 4 months, 5 months, or 6 months. For example, in certain embodiments, the bacterium may be administered to the subject every week, 2 weeks, 3 weeks, 4 weeks, month, 2 months, 3 months, 4 months, 5 months, or 6 months, and the privileged nutrient may be administered to the subject every 8 hours, 12 hours, 24 hours, day, 2 days, 3 days, 4 days, 5 days, 6 days, or 7 days.

[0157] Methods and compositions described herein can be used alone or in combination with other therapeutic agents and/or modalities. The term administered “in combination,” as used herein, is understood to mean that two (or more) different treatments are delivered to the subject during the course of the subject's affliction with the disorder, such that the effects of the treatments on the patient overlap at a point in time. In certain embodiments, the delivery of one treatment is still occurring when the delivery of the second begins, so that there is overlap in terms of administration. This is sometimes referred to herein as “simultaneous” or “concurrent delivery.” In other embodiments, the delivery of one treatment ends before the delivery of the other treatment begins. In certain embodiments of either case, the treatment is more effective because of combined administration. For example, the second treatment is more effective, e.g., an equivalent effect is seen with less of the second treatment, or the second treatment reduces symptoms to a greater extent, than would be seen if the second treatment were administered in the absence of the first treatment, or the analogous situation is seen with the first treatment. In certain embodiments, delivery is such that the reduction in a symptom, or other parameter related to the disorder is greater than what would be observed with one treatment delivered in the absence of the other. The effect of the two treatments can be partially additive, wholly additive, or greater than additive. The delivery can be such that an effect of the first treatment delivered is still detectable when the second is delivered. In certain embodiments, a side effect of a first and/or second treatment is reduced because of combined administration.

[0158] In certain embodiments, the disclosure relates to a method of clearing a therapeutic bacterium from a subject, wherein the bacterium encodes a therapeutic transgene that has reduced function (e.g., the therapeutic transgene becomes mutated thereby reducing or eliminating its therapeutic function). In certain embodiment, the reduction in function is a complete reduction, such that the therapeutic transgene is non-functional.

[0159] A bacterium having a therapeutic transgene with reduced function may have a reproductive advantage and outcompete bacteria carrying a functional therapeutic transgene. Accordingly, it is contemplated that in certain embodiments, a subject may be administered a control molecule (and optionally a bacterium as disclosed herein) for a first period of time (e.g., 6 months, 5 months, 4 months, 3 months, 2 months, 1 month, 2 weeks, 1 week), followed by a second period of time (e.g., 1 week, 2 weeks, 3 weeks, 1 month, 2 months) in which the subject does not receive the control molecule. During the second period of time, the bacterium comprising the reduced-function therapeutic transgene will be cleared from the subject. In certain embodiments, the method further includes a third period of time, after the bacterium comprising the reduced-function therapeutic transgene is cleared from the subject, in which the subject is administered a bacterium comprising a functional therapeutic transgene according to any of the treatment regimens described herein.

### Kits

[0160] In some embodiments a kit is provided comprising a bacterium as described herein. In one aspect such a kit comprises a bacterium as described herein; and a control molecule that is required for expression of one or more essential genes in the bacterium.

[0161] Throughout the description, where compositions are described as having, including, or comprising specific components, or where processes and methods are described as having, including, or comprising specific steps, it is contemplated that, additionally, there are compositions of the present disclosure that consist essentially of, or consist of, the recited components, and that there are processes and methods according to the present disclosure that consist essentially of, or consist of, the recited processing steps.

[0162] In the application, where an element or component is said to be included in and/or selected from a list of recited elements or components, it should be understood that the element or component can be any one of the recited elements or components, or the element or component can be selected from a group consisting of two or more of the recited elements or components.

[0163] Further, it should be understood that elements and/or features of a composition or a method described herein can be combined in a variety of ways without departing from the spirit and scope of the present disclosure, whether explicit or implicit herein. For example, where reference is made to a particular compound, that compound can be used in various embodiments of compositions of the present disclosure and/or in methods of the present disclosure, unless otherwise understood from the context. In other words, within this application, embodiments have been described and depicted in a way that enables a clear and concise application to be written and drawn, but it is intended and will be appreciated that embodiments may be variously combined or separated without parting from the present teachings and disclosure. For example, it will be appreciated that all features described and depicted herein can be applicable to all aspects of the disclosure described and depicted herein.

[0164] It should be understood that the expression “at least one of” includes individually each of the recited objects after the expression and the various combinations of two or more of the recited objects unless otherwise understood from the context and use. The expression “and/or” in connection with three or more recited objects should be understood to have the same meaning unless otherwise understood from the context.

[0165] The use of the term “include,” “includes,” “including,” “have,” “has,” “having,” “contain,” “contains,” or “containing,” including grammatical equivalents thereof, should be understood generally as open-ended and non-limiting, for example, not excluding additional unrecited elements or steps, unless otherwise specifically stated or understood from the context.

[0166] Where the use of the term “about” is before a quantitative value, the present disclosure also includes the specific quantitative value itself, unless specifically stated otherwise. As used herein, the term “about” refers to a +10% variation from the nominal value, or to a +10× variation on a log scale, unless otherwise indicated or inferred.

[0167] It should be understood that the order of steps or order for performing certain actions is immaterial so long as the present disclosure remains operable. Moreover, two or more steps or actions may be conducted simultaneously.

[0168] The use of any and all examples, or exemplary language herein, for example, “such as” or “including,” is intended merely to illustrate better the present disclosure and does not pose a limitation on the scope of the disclosure unless claimed. No language in the specification should be construed as indicating any non-claimed element as essential to the practice of the present disclosure.

### EXAMPLES

[0169] The following Examples are merely illustrative and are not intended to limit the scope or content of the disclosure in any way.

### Example 1—Identification of Privileged Nutrient Control Sequences

[0170] Functional linkage of essential gene activity to a hybrid two-component system (HTCS) activation requires identification of suitable control molecules. Characteristics of an appropriate control molecule are: safe for consumption, unable to be absorbed by the host, minimal presence in the average host diet, and unable to be consumed by host microbiota. For example, the marine polysaccharide, porphyran, found in the red algae Porphyra umbilicalis, was identified as a well-suited molecule. Additional exemplary molecules examined included agarose and anhydrotetracycline.

[0171] To identify the mobile genetic elements for polysaccharide utilization (termed a polysaccharide utilization locus or PUL), Bacteroides were diluted 200-fold into minimal media containing 200 μg/ml gentamycin and porphyran in the form of 0.8% nori extract as the sole carbon source. Selection was performed by collecting primary sewage effluent, allowing it to settle for approximately two hours and diluting it ten-fold into the media, which was then incubated anaerobically for 24 hours at 37° C. The culture was then further diluted 200-fold into the fresh media and incubated another 24 hours anaerobically at 37° C. The saturated culture was then plated as serial dilutions onto Blood-Heart-Infusion media +10% horse blood agar plates and incubated 24 hours anaerobically at 37° C. Colonies were then picked into fresh media and incubated 24 hours anaerobically at 37° C. to prepare for analysis and cryogenic storage.

[0172] Exemplary strains NB001, NB002, and NB003 were selected as capable of growth and were isolated and sequenced by Illumina MiSeq or iSeq. Homology searches were conducted to identify polysaccharide utilization loci (PULs) associated with their activity. NB001, a strain of Bacteroides ovatus, contained a PUL (SEQ ID NO: 14) having 98.1% identity to a previously published PUL for porphyran from Hehemann et al (2010), NATURE 464:908-912 and containing a putative porphyran-inducible HTCS (SEQ ID NOs: 18 and 19). A novel agarase-containing PUL was identified in NB002, a strain of Bacteroides dorei (SEQ ID NO: 15), and NB003, a strain of Bacteroides uniformis (SEQ ID NO: 16). This PUL contained a putative agarose-responsive HTCS (SEQ ID NOs: 22 and 23). NB004 demonstrated tetracycline resistance and contained a TCS-driven operon highly homologous to known tetracycline resistance genes (SEQ ID NOs: 24 and 25). The identified exemplary HTCS and TCS can be utilized to link essential gene activity to porphyran, agarose, or anhydrotetracycline.

[0173] Ten candidate promoter sequences were synthesized following analysis of the >78 kilobase porphyran PUL (SEQ ID NOs: 1-10). Each candidate was coupled to a luciferase reporter gene and luminescence was quantified in the absence of porphyran or in the presence of 0.2% porphyran. Results are described in TABLE 2. Six of the promoter sequences were responsive to porphyran, with P_por10 (SEQ ID NO: 8) demonstrating the largest expression upon porphyran addition, as depicted in FIG. 3A. Additional promoters that respond to agarose (SEQ ID NOs: 22 and 23) and anhydrotetracycline (SEQ ID NOs: 24 and 25) were identified and are shown in FIG. 3B, 3C.

TABLE 2
Candidate porphyran promoters tested and porphyran-
responsive luciferase reporter assay values

| SEQ ID | Name | −Por. | +Por. | Fold Ind. |
|---|---|---|---|---|
| 1 | P_por1 | 9.2E+2 | 5.8E+4 | 63 |
| 2 | P_por2 | 1.5E+3 | 9.9E+4 | 65 |
| 3 | P_por3 | 6.3E+2 | 4.7E+2 | 1 |
| 4 | P_por4 | 8.6E+2 | 8.9E+2 | 1 |
| 5 | P_por5 | 3.8E+4 | 3.3E+4 | 1 |
| 6 | P_por6 | 8.2E+4 | 8.0E+4 | 1 |
| 7 | P_por9 | 5.8E+2 | 5.2E+5 | 894 |
| 8 | P_por10 | 9.2E+2 | 7.7E+5 | 842 |
| 9 | P_por11 | 5.4E+2 | 8.5E+3 | 16 |
| 10 | P_por12 | 4.3E+2 | 2.3E+5 | 536 |

[0174] P_por10, which displayed the largest fold induction, was selected for use in biocontainment. Strain NB001 carrying a P_por10-driven luciferase, as shown in FIG. 4A, (SEQ ID NO: 26), was used to characterize the porphyran induction curve. Luciferase-protein expression was used as a reporter for porphyran-dependent transcription levels and quantified by luminescence/OD₆₀₀ₙₘ. A nearly 1,000-fold induction of luciferase was observed between concentrations of approximately 10⁻⁷ to 2×10⁻⁴ porphyran extract (weight/volume), as shown in FIG. 4B.

[0175] To examine if the P_por10 HTCS alone was sufficient for luciferase expression, a P_por10 luciferase construct (SEQ ID NO: 26) was altered to include expression of the porphyran HTCS (SEQ ID NOs: 18 and 19) under its native promoter. The resulting construct (SEQ ID NO: 27) was transferred to a strain either containing the full porphyran PUL, NB001, or a strain lacking the porphyran PUL, NB004. Luminescent output was measured and though the strain with the porphyran PUL demonstrated porphyran-dependent luciferase induction, the strain containing only the HTCS did not display porphyran-dependent induction (FIG. 5). These results suggest the HTCS and additional genes are required for induction of the porphyran-responsive promoters. For example, the SusC and SusD genes (SEQ ID NOs: 20 and 21), in addition to the HTCS (SEQ ID NOs: 18 and 19), may be necessary for induction of the porphyran-responsive promoters (SEQ ID NOs: 1, 2, and 7-10) on complex polysaccharides.

### Example 2—In Vitro Privileged Nutrient-Dependent Biocontainment

[0176] Using the PUL for porphyran growth identified in Example 1 (P_por10), a Bacteroides strain expressing porphyran-dependent induction of the essential gene thy A, thymidylate synthetase, was generated. Endogenous thy A (SEQ ID NO: 28) was knocked out using a method similar to that described in Koropatkin et al, (2008) STRUCTURE 16:1105-1115 with the modification of trimethoprim and thymidine counterselection, resulting in strain NB023. A P_por10 (SEQ ID NO: 8) driven thy A-luciferase plasmid with degenerate ribosome binding site (RBS) (SEQ ID NO: 30) was generated and is shown in FIG. 6B. The plasmid was integrated into NB023. The strain was grown in minimal media with chlorophenylalanine counterselection, streaked onto BHIS agar plates, and colonies displaying GFP positivity and/or chloramphenicol resistance were selected and validated for gene promoter replacement by PCR and Sanger Sequencing.

[0177] Individual RBS library members were assayed for thyA expression. Each was grown in media containing thymidine, then diluted into media without thymidine but containing porphyran. Strains with unique RBSs were assayed for luminescence and final OD₆₀₀ₙₘ, depicted in FIG. 6A. Strains capable of growth to high OD₆₀₀ₙₘ all displayed similar levels of luminescence, suggesting that a narrow range of thy A expression is permissible for growth. Strain NB024, which best complemented the thy A deletion, was sequenced (SEQ ID NO: 31) and selected for further experimentation.

[0178] FIG. 6C depicts the results of a growth assay for NB024, wildtype strain NB001 and thy A deletion strain NB023 in nutrient-variable media. All three strains are capable of growth in media containing thymidine (dashed lines). Only wildtype NB001 shows growth in standard BHIS media (dotted lines). In BHIS supplemented with porphyran (solid lines), NB024 grows at a level comparable to wildtype, though with a slight initial lag possibly caused by time required for thy A induction. The thy A deletion strain NB023 does not grow in BHIS media supplemented with porphyran.

[0179] Additional testing of NB024 demonstrated a porphyran-concentration dependent growth response in BHIS media depicted in FIG. 6D. Taken together, these results demonstrate functional linkage of the porphyran-responsive HTCS (SEQ ID NOs: 18 and 19) and expression of essential gene thy A.

[0180] The escape rate of NB024 biocontainment was assessed. NB024 was plated on BHIS plates supplemented with thymidine, and five individual colonies were picked. Colonies were grown at 37° C. for 14 hours in BHIS supplemented with 0.2% nori extract (porphyran). Saturated culture was then plated onto porphyran-lacking BHIS agar evenly or through serial dilutions; colonies visible after 48 hours of anaerobic growth were considered escape colonies. Approximately 1 in 3,500,00 cells displayed growth on plates lacking porphyran supplementation.

### Example 3—Engineering of Privileged Nutrient Promoter Control of Essential Native Gene in Bacteroides

[0181] To extend the biocontainment strategy to additional essential genes, a vector was developed to replace the endogenous promoter of an essential gene with the porphyran-inducible promoter shown in FIG. 7 (SEQ ID NO: 32). This replacement method employs homologous recombination to replace the promoter of a gene of interest with a cassette containing the porphyran-inducible promoter and degenerate RBS library to find appropriate translation strength permissible for growth. Tetracycline selection allows for identification of integration of the plasmid, while counterselection on 4-chlorophenylalanine and selection of GFP positive colonies allows for identification of native promoter displacement.

[0182] Using plasmid pWD035 (SEQ ID NO: 33), a porphyran utilization locus was integrated as described in Shepherd et al. (2018) NATURE 557:434-438 to make strain NB075. The native promoter of one of four essential genes, arginyl-tRNA synthetase (argS), cysteinyl-tRNA synthetase (cysS), penicillin tolerance protein (lytB), or peptide chain release factor (RF-2), was replaced using the promoter replacement system (SEQ ID NO: 32, 34, 35, and 36, respectively). Strains capable of growth in the presence of 0.2% porphyran were isolated and sequenced to identify appropriate translation strength. Constructs for each essential gene are as follows: argS, SEQ ID NO: 32; cysS, SEQ ID NO: 34; lytB, SEQ ID NO: 35; RF-2, SEQ ID NO: 36. Biocontained strains sWW090 (thy A), sWW180 (argS), sWW202 (cysS), sWW205 (lytB), and sWW206 (RF-2) do not grow in BHIS-only media, but do grow in BHIS-supplemented with porphyran. Results are depicted in FIG. 8.

[0183] To monitor the escape dynamics and potential mechanisms of these biocontained strains, a non-biocontained and a biocontained strain were grown in a chemostat containing 0.5% porphyran, which was continuously diluted, replacing the media volume every 8.7 hours. Wildtype strain sZR0103 quickly reached and maintained a density of over 10⁹ Colony Forming Units (CFU)/ml; argS biocontained strain sZR0205 also reached a density of over 10⁹ CFU/ml but quickly dropped in optical density (about 500-fold) as the porphyran was consumed and diluted out of the media. Mutant cells of the biocontained strain that had escaped their dependence on porphyran supplementation appeared by day 2 of the assay and approached levels comparable to wildtype by day 4, as shown in FIG. 9. Sequencing of the escape strains revealed that of the 331 escape colonies evaluated, 94% of the escape colonies were one of 48 unique mutations to the HTCS that rendered it constitutively active, 4% were transposon insertions into the porphyran inducible promoter, and 2% were genomic rearrangements immediately upstream of the biocontained gene.

### Example 4—In Vitro Privileged Nutrient-Dependent Biocontainment of Bacteroides

[0184] To demonstrate the efficacy of biocontainment in vivo, Sprague-Dawley rats were fed a porphyran-supplemented diet and were administered 10⁹ CFU of either sWW808, a non-biocontained strain, or sWW805, a variant of biocontained strain sWW180 carrying an additional antibiotic marker. Both strains were modified to consume porphyran, and both strains were co-administered with a non-porphyran consuming wildtype strain to ensure a competitive environment. Colonization occurred for 3-days before half the rats in each group were switched to a diet without porphyran, while the other half remained on the porphyran-supplemented diet. Strain abundance was monitored in the feces daily, and it was observed that the biocontained strain was rapidly cleared from the gut in the absence of porphyran, while the wildtype strain showed a 10-fold decrease in abundance due to the absence of its privileged nutrient, porphyran, shown in FIG. 10. When the biocontained strain was tested in a non-competitive environment, following removal of porphyran, escaping strains were found to possess mutations resulting in constitutive expression of the essential gene, similar to those characterized in Example 3.

### Example 5—Engineering of Hybrid Two Component Privileged Nutrient Control in Bacteroides

[0185] To reduce escape rates of biocontained strains, redundancy was incorporated using a second privileged nutrient control. Using the strain sWW202 with cysS expression driven by the porphyran-inducible promoter, anhydrotetracycline (aTc)-inducible control of argS expression was introduced. Incorporation of the aTc-biocontainment plasmid (SEQ ID NO: 37, FIG. 11) was performed similarly to that described in Example 3, using an aTc-inducible promoter previously described in Lim et al. (2017) CELL 169:547-558, and an RBS library to generate strain sCG037. sCG037 was predicted to require both porphyran and aTc supplementation for growth, which was observed in vitro, depicted in FIG. 12.

[0186] To monitor the escape dynamics and to assess if redundancy reduces escape rate, a non-biocontained strain (NB075) and double-biocontained strain sCG037 were grown in a chemostat containing 0.2% porphyran and 10 ng/ml aTc, which were serially diluted out of the media. Both strains initially reached a density of over 10⁹ CFU, which decreased upon removal of the porphyran and aTc from the media to the limit of detection (10^{3.5} cells/flask) by day 4. At day 7, porphyran and aTc were added back to the media in order to assess if any biocontained cells had survived and were capable of growth. No growth of the biocontained strain was detected after 2 days, suggesting all double-biocontained cells had been cleared. Results are depicted in FIG. 13.

### Example 6—Engineering of Chimeric Hybrid Two Component Privileged Nutrient Control in Bacteroides

[0187] To simplify therapeutic strains such that administration of a single control molecule is linked to expression of multiple essential genes, chimeric HTCSs were designed. In one embodiment of such a chimeric HTCS, the sensor of one HTCS is linked to the DNA-binding region of a second HTCS. This can be done by replacing the sensor domain of the second HTCS with the sensor domain of the first HTCS such that the chimeric HTCS senses the control molecule of the first HTCS but targets a different promoter than the first HTCS.

[0188] HTCSs with a signal transduction Y_Y_Y domain, with high homology to the porphyran Y_Y_Y domain (SEQ ID NO: 19, residues 683-747) were examined for use in the generation of chimeric HTCSs. As it is important to consider that the newly designed promoter only responds to the chimeric HTCS and not to molecules produced by or commonly encountered by the host or to other HTCSs or other regulators native to the host, the HTCS should contain regulatory domains either absent or rarely found in the biocontained strain. Accordingly, the set was refined by removing HTCSs with high homology to other HTCS regulatory domains, particularly those in the target strain.

[0189] A first HTCS from Bacteroides nordii (SEQ ID NO: 51), a second HTCS from Bacteroides nordii (SEQ ID NO: 38), and an HTCS from Bacteroides salyersiae (SEQ ID NO: 52) were selected for experimentation. The C-terminal region (containing the regulatory domain) of each of these three HTCSs was fused to the N-terminal region (containing the porphyran-sensor domain) of the porphyran HTCS (SEQ ID NO: 19, as described in Example 1). We tested a number of different fusion locations, and found that the location immediately downstream of the Y_Y_Y domain of the porphyran HTCS, within 5 residues of the putative periplasmic side of the inner membrane (residue 753 in the porphyran HTCS, SEQ ID NO: 19), was the most reliable location for generating functional chimeras. A chimeric HTCS was generated including the sensor domain of the porphyran HTCS and the regulatory domain of the first HTCS from Bacteroides nordii. This HTCS is referred to HTCS-17106 (SEQ ID NO: 53) and an exemplary vector encoding HTCS-17106 is referred to as pWW1266 (SEQ ID NO: 55). A chimeric HTCS was generated including the sensor domain of the porphyran HTCS and the regulatory domain of the HTCS from Bacteroides salyersiae. This HTCS is referred to as HTCS-10809 (SEQ ID NO: 54) and an exemplary vector encoding HTCS-10809 is referred to as pWW1265 (SEQ ID NO: 56). A chimeric HTCS was generated including the sensor domain of the porphyran HTCS and the regulatory domain of the second HTCS from Bacteroides nordii. This HTCS is referred to as HTCS-17150 (SEQ ID NO: 39) and an exemplary vector encoding HTCS-17150 is referred to as pWW1267 (SEQ ID NO: 40). A schematic of pWW1267 is shown in FIG. 14B.

[0190] Promoters responsive to each of the chimeric HTCSs were identified. A promoter responsive to HTCS-17106 is depicted in SEQ ID NO: 62, and a promoter responsive to HTCS-10809 is depicted in SEQ ID NO: 63. Luciferase reporters for each of the chimeric HTCSs were generated by coupling the corresponding promoter to a luciferase gene. The luciferase reporter for HTCS-17106 is depicted in SEQ ID NO: 57, the luciferase reporter for HTCS-10809 is depicted in SEQ ID NO: 58, and the luciferase reporter for HTCS-17150 is depicted in SEQ ID NO: 41. Bacteroides vulgatus strains containing a porphyran utilization locus (as described in Example 3) and one of the luciferase reporters above were further modified with either an empty vector or a construct that expressed the associated chimeric HTCS. In the presence of the chimeric HTCS, porphyran-responsive luciferase expression was observed for each chimeric HTCS, as shown in FIG. 14C. The chimeric HTCSs can, for example, be used in combination with the wildtype porphyran-responsive HTCS in order to reduce biocontainment escape rates, similarly to the system described in Example 5, with the advantage of using a single control molecule.

### Example 7—Engineering Improved Chimeric Hybrid Two Component Systems via Targeted Mutation

[0191] To aid in the generation of biocontained strains, HTCS-17150 (SEQ ID NO: 39, as described in Example 6) was mutated to improve porphyran responsiveness. Residues in the transmembrane region (residues 753 through 777) were targeted for mutation by amplification with degenerate oligos, and the resulting variants of the pWW1267 (SEQ ID NO: 40) expression construct were added to Bacteroides vulgatus strains containing a porphyran utilization locus (as described in Example 3) and the chimeric HTCS-associated luciferase reporter (SEQ ID NO: 41, as described in Example 6), as shown in FIG. 15A. Strains including the HTCS-17150 mutants were then screened for activity in the presence or absence of porphyran. Results are shown in FIG. 15B. Each point in FIG. 15B represents a strain expressing an HTCS-17150 mutant, with points along the diagonal no longer responding to porphyran and points in the upper left portion of the plot showing the desired higher activity in the presence of porphyran and lower activity in the absence of porphyran. Compared to the control (strains expressing the unmutated HTCS-17150, shown as squares in FIG. 15B), a number of strains were identified with improved porphyran responsiveness. Select strains were restreaked and tested in replicate, as shown in FIG. 15C. An exemplary strain including the construct pWW1333 (SEQ ID NO: 60) showed lower activity in the absence of porphyran and higher activity in the presence of porphyran. pWW1333 expressed a mutant HTCS-17150 referred to as HTCS-17150v2 and having an amino acid sequence shown in SEQ ID NO: 59. Additional improved mutant HTCSs referred to as HTCS-17150v3-HTCS-17150v10 have amino acid sequences shown in SEQ ID NOs: 64-71, respectively.

### Example 8—Orthogonality of Engineered Chimeric Hybrid Two Component Systems

[0192] When a first and a second HTCS (e.g., a wildtype HTCS and a chimeric HTCS) are used to implement double-biocontainment, it is important that activation of the first HTCS does not activate the promoter associated with the second HTCS. Otherwise, an activating escape mutation in a single HTCS could be sufficient for escape. To demonstrate orthogonality of the HTCSs described in this Example, we tested (i) the wildtype porphyran-responsive HTCS (SEQ ID NO: 19) in combination with a HTCS-17150v2-responsive promoter (SEQ ID NO: 45), and (i) the chimeric HTCS-17150v2 (as described in Example 7) in combination with a wildtype porphyran-responsive promoter (SEQ ID NO: 8). Each HTCS was also tested with its associated promoter as a control. The results are shown in FIG. 16, and show that the promoters associated with the wildtype porphyran-responsive HTCS and HTCS-17150v2 are not activated in the presence of the other HTCS, and only activated when the associated HTCS and porphyran are both present.

### Example 9—Engineering Double Hybrid Two Component System Privileged Nutrient Control in Bacteroides

[0193] This Example describes the generation of strains including a first and a second HTCS (a porphyran-responsive wildtype HTCS and a porphyran-responsive chimeric HTCS) to implement double-biocontainment.

[0194] A Bacteroides vulgatus strain (sWW810) was modified to be capable of porphyran consumption (using plasmid pWD035 (SEQ ID NO: 33) as described in Example 3) and also express a chimeric HTCS (SEQ ID NO: 59, as described in Example 7). The strain was further modified to replace the native promoter of the essential gene penicillin tolerance protein (lytB) with a promoter responsive to the HTCS (SEQ ID NO: 45). The promoter was replaced using the promoter replacement system described above in Example 3. Briefly, this replacement method employs homologous recombination to replace the native promoter with a cassette containing the promoter of interest and degenerate RBS library to find the appropriate translation strength permissible for growth. A biocontained strain capable of growth only in the presence of 0.2% porphyran was isolated, and is referred to as sWW939. A construct including the cassette from sWW939, with the appropriate resulting translation strength, is referred to as pZR3007 (SEQ ID NO: 61).

[0195] Strain sWW180 (as described in Example 3, and biocontained with the wildtype porphyran HTCS driving expression of argS) was further modified with pZR3007 to produce a double biocontained strain (sWW942) that also had lytB under control of the chimeric HTCS. The non-biocontained (NB075), the two single biocontained strains (sWW180) and sWW939) and the double biocontained strain (sWW942), were tested for growth in BHIS media only and BHIS media supplemented with porphyran. Results are shown in FIG. 17.

[0196] To compare growth dynamics and potential escape ability, the non-biocontained (NB075), the single biocontained strains (sWW180), and the double biocontained strain (sWW942) were grown in a chemostat initially containing 0.5% porphyran, which was continuously diluted with media lacking porphyran, replacing the media volume every 11 hours (similar to the experimental setup associated with FIG. 9). Results are shown in FIG. 18. The non-biocontained strain (NB075) quickly reached and maintained a density of over 10⁹ CFU/ml. The single biocontained strain (sWW180) also reached a density of over 10⁹ CFU/ml but initially quickly dropped in density (more than 100-fold) as the porphyran was consumed and diluted out of the media. However, the single biocontained strain approached levels comparable to wildtype by day 4, as mutant cells of the biocontained strain escaped their dependence on porphyran supplementation. The double biocontained strain (sWW942) initially dropped in density similarly to the single biocontained strain, but escape mutants never appeared and the density dropped to below the limit of detection. After 32 day's, porphyran was added to the media to encourage outgrowth of any surviving double biocontained cells, but after three days on porphyran no cells could be recovered from the double biocontained chemostat. This indicates that the chemostat that at one point harbored more than 30 billion cells had been sterilized by double biocontainment in rich media lacking porphyran.

### Example 10—In Vivo Biocontainment in Mice Harboring Human Microbiota

[0197] This Example describes biocontainment in vivo in mice that harbor a human microbiota.

[0198] A Bacteroides vulgatus strain was modified to be capable of porphyran consumption (using plasmid pWD035 (SEQ ID NO: 33)) to produce strain NB144. NB144 was further modified for biocontainment using plasmid pZR2837 (SEQ ID NO: 72) to produce strain sZR0323. In strain sZR0323, argS is associated with a RBS (SEQ ID NO: 47), and under control of a promoter (SEQ ID NO: 73) that is responsive to a porphyran HTCS (SEQ ID NO: 19).

[0199] Germ free Swiss-Webster mice were colonized with microbiota from one of four anonymous healthy human donors (donors A-D). After 3 weeks of microbiota stabilization, mice were administered 10⁹ CFU of either NB144 or sZR0323 and fed a porphyran-supplemented diet. Strain abundance was monitored in the feces daily via quantitative polymerase chain reaction (QPCR) to quantify the number of copies of the porphyran utilization locus. Results are shown in FIG. 19. Both strains reached a colonization level of at least 10⁹ cells/g feces within the first week, and remained between 10⁹ and 10¹⁰ cells/g for the period in which porphyran was included in the diet. After 4 weeks porphyran was removed from the diet. After the diet switch, in the groups of mice containing microbiotas from donors B and C, it was observed that both the non-biocontained and the biocontained strain dropped substantially in abundance, with the non-biocontained strain dropping more than 100-fold and the biocontained strain dropping even further to below the limit of detection of 10⁶ cells/g feces. In the other groups of mice, containing microbiotas from donors A and D, it was observed that the non-biocontained strain remained at a high abundance of about 10⁹ cells/g feces, but the biocontained strain dropped about 1000-fold in abundance. This data shows that the biocontained strain is substantially attenuated in the context of mice harboring human microbiota.

### Example 11—Engineering of Complementary Biocontainment Mechanisms with Privileged Nutrient Control in Bacteroides

[0200] The biocontainment strategies described in previous Examples can be further modified by the addition of complementary biocontainment mechanisms. One such mechanism is the establishment of a competitive ecosystem through introduction of a non-engineered, competing strain lacking the ability to grow on porphyran but retaining all other polysaccharide utilization capabilities. Another such mechanism is through deletion of genes in the biocontained strain that significantly impairs the fitness of the strain when not grown in the presence of porphyran, such as a polysaccharide utilization locus involved in polysaccharide metabolism.

### INCORPORATION BY REFERENCE

[0201] The entire disclosure of each of the patent and scientific documents referred to herein is incorporated by reference for all purposes.

### EQUIVALENTS

[0202] The disclosure may be embodied in other specific forms without departing from the spirit or essential characteristics thereof. The foregoing embodiments are therefore to be considered in all respects illustrative rather than limiting on the disclosure described herein. Scope of the disclosure is thus indicated by the appended claims rather than by the foregoing description, and all changes that come within the meaning and range of equivalency of the claims are intended to be embraced therein.

The application's sequence listing, which the Patent Office published only in electronic form, follows.

SEQUENCE LISTING (84 sequences)

SEQ ID NO: 1 - DNA, 500 bp, Bacteroides ovatus
ttttgggtgttgatatggcaggctatgttttgttattggggaaagtggattttcacagtatttgtgaggtcatatatggaatataaggatagccgcctttgaattacggctatgcgtcacgtcggtcgcagttaatccctgtaatcttttctttaattctaatccgtttgccgccgcattctttttcaggtgaattttcatggcgatagccataaagaaaattctcctgaaaaaaggaataaatgcggctggcaaatcaggattggaatttatctttgatggaagggataggatgagaatatataaaaattgtttgaaaaggcttttgacttgggaatatataatattttcatatagagtgctacatagcatagtaatactgacagttttttttaagttttagctcatatgtaaaaataccactctatatagatagaaataccccctattcattgttcgttatacttatatatttgcatagaaacttaaaatgcgaattt

SEQ ID NO: 2 - DNA, 150 bp, Bacteroides ovatus
tcatatagagtgctacatagcatagtaatactgacagttttttttaagttttagctcatatgtaaaaataccactctatatagatagaaataccccctattcattgttcgttatacttatatatttgcatagaaacttaaaatgcgaatt

SEQ ID NO: 3 - DNA, 150 bp, Bacteroides ovatus
tttaattctaatccgtttgccgccgcattctttttcaggtgaattttcatggcgatagccataaagaaaattctcctgaaaaaaggaataaatgcggctggcaaatcaggattggaatttatctttgatggaagggataggatgagaata

SEQ ID NO: 4 - DNA, 150 bp, Bacteroides ovatus
ctctcatatatgataataaactgccaatatcgaattacaagtaaatatatatttcaacaaaaaaggtttagcctattattacacaacaatttcaccctaagaataaaatatatatagagtaaatttgccaatataacaaactgtaaaaac

SEQ ID NO: 5 - DNA, 200 bp, Bacteroides ovatus
tgtgtaataataggctaaaccttttttgttgaaatatatatttacttgtaattcgatattggcagtttattatcatatatgagagggggtaaatttgttcaataataggtggtaaatattttaccccttactatagtaattaaattatttattgtaaatggaactcaagtgtatctttgcttacagaaaaaattaatgtc

SEQ ID NO: 6 - DNA, 150 bp, Bacteroides ovatus
tgaaatgaagttaaagatttatttttttcttgattgattttgatacgcattctaaagtggaaaatatctataattatctattaactactgtaaatacttgatgttttagataaaatcaataactttgtaatcttgatgaaatataaagaa

SEQ ID NO: 7 - DNA, 300 bp, Bacteroides ovatus
tccgaggcagaaaaccatagatctcgatatggaaaacatattgccggagtcgaggactgagggtacggacgtaaagtggggtatatggcggtttgaaaagttattcttatgtaaattagccggtaatacggtattattcttctgtcgggttttatatatcgtaaaaacacatggtttcatgagtgaaataattgtgtttcagggagtggtagaattttaccccaccttttacgatgtaaatcccccttaatgctttcatgaaacttatatacttttgtcgtgtaacaaaaaatctaaaac

SEQ ID NO: 8 - DNA, 430 bp, Bacteroides ovatus
gggtcggtcctggtattggaacagctttcgcattgagaaattcaagaaatgaaagcggggaaatggtgaacagaaccatgtatgccgaatcggcaggaattactcaggtgtccctgaatgtgatttataaacttcggattatggaatatgaaatcccgttgacggtgatgacgtattggaatccgaaatccaaccagggatttttctacacaggaatgcagttcaatctgttttgattttttatagagtttggggtgactttttatctcctttatgaggggtaaaaatgtcgaaaaagagggggtataatatcccctctttcttttttgaaaatctcctctattgttttgatggatacttcatactttagcatcgtcgaaaagataaagacagtgacatgtaatactaacatattaatatcaataatatc

SEQ ID NO: 9 - DNA, 560 bp, Bacteroides ovatus
aagagggggtataatatcccctctttcttttttgaaaatctcctctattgttttgatggatacttcatactttagcatcgtcgaaaagataaagacagtgacatgtaatactaacatattaatatcaataatatcatgaagacagaaggatataaagtgaaaagttattccctgcctgtgaagagatactgtcagacattgagtctgcgtgagaatccggaattgattgaagcctacagaaaggctcacagtaaggaagaggcatggcctgagatacgcgccggaatacgcgaggtgggaatcctggaaatggaaatatacatattggggtcaaaactctttatgatagtggaaacacctctggattttgactgggatacagctatggcaaagcttgccactctgccgcgtcaggccgaatgggaagaatacgtagccaaattccagcagtgtgccgagggggccacatcggacgagaaatggaagatgatggaacgtatgttctatctgtatgaataagaataaacagagtaaaaaatattaacctttaaattatttat

SEQ ID NO: 10 - DNA, 150 bp, Bacteroides ovatus
cttctatcaggtggcatatgtaatacctctgatatgtttcttctttacggcatattatggctggagaggatataagatagagaaaaaacaacattgaattaatgcaacatcaaaataatacaataacaaatttaaataaatacatagatt

SEQ ID NO: 11 - DNA, 346 bp, Bacteroides ovatus
aaacatcatttttatggtcaggtgctttaattaccaacaagcatctgactatttgtacaatctggataccttgaaaaccaagattctatctgaaaaaacgaaaatacccactctttaatttcaaaacacctactattccatcaattcggaagttataaatttgctttgtattaaaaattacgtgagtttaagtaaaccacgacaatatcacaaataagatattcgacaagctattttcgtataaatttattataaatgaaaaaccaagcaaagtaatactttttataatcatttacaacggcagcagatttagttctgctactgttgtaaatttaaattggtaatt

SEQ ID NO: 12 - DNA, 450 bp, Bacteroides uniformis
taaatacatcggcattctgaattattctttctttgttcagagattttggcagtggaacaacgttgttctgtagtacccatctcaaacatagctgagccaccgatttattgtatcttgatgctatttcacatagaacaggatactgcagcatatatccgtttccaagcggactccatgctttactgtaatattatttctctggcaataaagtactgtatccacttgtgtatatccagggtgaaactcaatctgatctaccatcagctgtatatttgcacttgtaaaattaaatgtctataattgcttatattgtagatgagaacttttataaaaaaaatgccattgtatgcaaatacaccatattaaaaactcttttccaatatatataaaacaccaactatcactttctttgcaaaaaaattaatttattgtttgctaaaaaatcaattt

SEQ ID NO: 13 - DNA, 298 bp, Bacteroides uniformis
aaaagttttcccaacggtgtatgccgcattatctacatccttgataaaaaagcaagatagccaaaatgtgcggcaagcatacatttttattttcaagaatagaataaatgttctgattacaaacaatttaagtcggagataatttgtccctgtgaaaaaatattgaattttataccactgaaatacaacactttgtaaaattgagcgttggattttttgttttctgccgcgttttttgccaattatattcatgtgcgcataccgaaaacagagtgtaaaatttcaaaattgacaggac

SEQ ID NO: 14 - DNA, 78665 bp, Bacteroides vulgatus
taaggattgattcgctagctcagcaggtagagcacaacacttttaatgttggggtcctgggttcgagccccaggcggatcactgaaacaaaaagcaaaacaatgaaaaccgctgataatcaatcattatcagcggtttttctttttatccatactgcaaattgaagcagaataccgcattttactggaggtgaaataggtggacttaatttccacataaaaacaagtccacctgattggattatatttcactgattctctgcgttttgcataaaacaaactcttttcaaaacatgtatttttacaccatcaaaaaaagaagagtatggcaatgcaaagaaactattttacggtattgtttttcctgaagaaatcaaagctgcttaaaaatggagaagcaccaatctgtatgcgtatcacaataaacggaaaacgtgcagaggtacaaatcaagcgaagtatagatgttacaaaatggaatacgcaaaaagaatgcgcgattggcagggaaaagaagtatcaagaaataaaccactatcttgatacgataagaactaaaatccttcaaattcaccgtgaacttgagcaggacggtaaacctattacagcagatattataaaaaatatctattatggagaacactctactcccaaaatgctgcttgaagtattccaggaacacaattcggaatatcgggaattaatgaacaaggaatatgccgaaggtactgtacttcgatacgaacgtacagcaagatatttgaaggagtttatcagtgaacaatataaactggctgatattccattaaaatcaatcaactatgaatttataaccaaattcgaacatttcattaaaatacagaaaaactgtgcgcaaaatgcgacagtgaaatatctgaaaaatttaaagaaaatcatcaaaactgcattgataaagaagtggataactgatgatccgtttgcagaaatacacttcaaacagaccaagtgtaaccgtgaattcttaaacgaaatggaacttcgcaaaatcatcaataaagattttgatattcaacgattacaaaccgtaagggacatattcatcttctgttgtttcaccggtttggctttcacagacgtaaagaatctgaaaaaggaacaccttgtacaggctgataatggtgaatggtggataagaaaagcaagggaaaagaccgataatatgtgcgacattccattgttggatataccaagacttattttagagaaatatcagtcaaatccaatctgcaatgaaaaaggattattacttcctgttcccagcaaccaacgaatgaacagttatttgaaagaaatagctgatgtatgtggtattcagaagaatctttccacacatattgcaagacatacatttgcatcactggctattgcaaataaggtttccttggaatccattgccaaaatgttaggacacacggacattcgtacaactcgtatttatgccaaaataatgaattctaccattgccaatgaaatgaaagtactgcaaaacaagttcgcaatataattttcaaccattatttcatttcttacagcaaatatcgcactttgccactgactgtgcaaggcggccctgtcgggctggttggcggaaaaaaatcatcctcgcttcgctccggtatttttttccgccaagccttgcaccggtcattggcaaagaacagccgggccagtaagaaattgaaatactggctccacggagccggtcatgtctaatttaaataaaagaatatgactgaagaagttggaaagaaggtatgtgaaggtacagtagcagacctcatgaaggacaagaccggaaaacagacggttgtcacgttgacaagaaagaatgcttaccgagtgaagaaaatcagagaacaagggacggatgacgaagctgtcctttttcatttccgtgaacgctgtacgggaatgggctcctatgtacacacaatcgaagcggcagacggagaaacagaacttcatccgtctgaatttgaaaaatgggaagctgtggaattcctgtatcccggctatctggaagacctgcttgatgctgcatacaacgcatacagatggagttccttcgaacctgaagcaagggcggaaacagacatcatgcaatatgaaaaacaacttgtagaggatctgaaacagattccggaagaaaaacagaacgagtataccagtgcataccatagcaagttctctgccttgctgggctgtctctcacgatgtgccagtccgatggtgacagggcctgccaaattcaactgccagcgcaacaacaaagccttggatgcataccagaacagatttgatgaatttcatgattggcgtaaccgcttcaaggctgccatggaaaggatgaaagaggctgccaaaccggaagaacagaagcaagaggaggcatggaaccgcctgaagcgtgacattgcaagcagcgcacagaccattcatgatattgataccggtaaagcaagaggatacagccgtgccttgtttgtcagcagtatccttaataaagtaagcacctatgcaggaaaaggagaagtggaaatcgtacagaaagcggtggacttcattacagacttcaatgcacaatgcaaaaaaccggttatcactccgcggaaccgtttcttccaactgccggaaatggcacgccaggccagactgaaacttcaggaaatcagagaacgggaaaaccgtgaactgaaatttgaaggcggaacgctggtatggaactatgaggcagaccgcctgcaaatccagtttgacaatattccggatgaccagaggcgcaaggaactgaaatcatacggtttcaaatggtcgccgagataccaggcatggcaacggcaacttacacagaatgccgtatatgcagtcaaaagagtgttgaaccttcaaaacctataagacatgaaagaccgattgaaatatgtaatcgattcccgctacttcgacggaacatgcctgacaagtatgagtgacggattccataatgactatggtggggaaacaatcgaagaactgcgcatacgggaaaacaatccctatctgaaagcagtaacaccttctgatatagacaagaagctgcggctatacaatcagtccctgtccgaaccgttcaaggaaatcactgaagaagaatactatgacctgctggatgtactgccacccttgcgcatgagacaaaactcgttctttgtaggagaaccgtattacggaaatatgtactctttctgctttactcgtcaaggaagatatttcaagggcctacgctccgtacttactccgcaatccgaactggacagtcagatagaccgtcacatggaaatcatcaaccggaaagccgtgatctcaaaagaggaaacaagtaaaacggtcacaaccggaaccagactcattccctattatttttcactggacggaaaacagcccgtattcatctgcaaccttgtcatccaatcagattccagtcaagcaaggacggacatggcgaataccctgaaaagtcttcgccggaaccattatcagttctataaaggaaaagggcattacgaaactccggacgaactgatagaccatgtatcaggaaagaagctcacccttgtttccgacggacatttctttcaatatcctcccggcagggaatccgcaactttcatcggacacatcaaggagacatcagaggaatttcttttccggatctatgaccgtgaatatttcctgtatcttcttaaaagactgaggaccgtgaaaaaggaatcggcacaggaacaaataaatatcaaatcataacattcgggggaatgcggtaaaatgactgccgtattccctcataaaaacaatacaagtatgaacaaatcaaacactctatactggaaaacagccacagatccggctgaacgcattgaggtcagactcgtcctgaacagttatatcgacaatgacaatctgtatgtaggacttgaatcccggtctaaggagaatccggaatgctgggaatcctacacggacatcaccgtcaacctcaattctcttcccccgttccatgcctatgtggacaaccgggactgcaacagacatgtgcatgattttctgaccagtaacagaatagcagaacctgccggatttgaatatcagggattcagaatgttccgcttcaatcctgacaggttgaaggaactcgcacccgaacagttcaagacaatcagcgccaaactgccaccacaggatgacatgataaaggacatcatctatcaggaaagacgtttccctttgagaactgttcaagacattcacggaatatatcttgtttcaagcaaggaactggaagaatctctgatcgaaggagtacggaacctggatgctgcggcatatgaactgctggatggcatctgcctgttctgctccacacaggaactgcgctatcttacggatgcagaactgatagaaacaatctacgcacaataaaaaggaggaacaaatatgaaaaccggagacattgtatttctgagacgtccctataagggataccgtgccgtcgaactgatggaaagactggaatgccgctggctggtcaggattgtcgagagcggtcttgaactggaggtatatgaagatgaacttatatcagaattttaatacagacaaagtgttatggaaaaatatcagtttgcattccattcggaaataatcggctatacctctcctcatatcggtgaggtcagaaaagccatacacagaaaagtggaaaaggaaaagtctgccgccataaagaatgatattgagctgcacatgtacaaagtgcatgacggcataccggttctccttaacacctgctacctgtacgatgaaaaaggatgtatggtacacggaagtatcaagggaaccaaggattatctgcttgagacatggagataccatacaaacagacattctaaaggcatcagttccacaagaatcaggccttgcacgacaagcagggctttttcatttgtataactcttaaaatcagaaatcatgaaccagacattacaacttacagactatattccacagaatgtaagcctctactacgtggactaccgggatgatcttgatgagcatgaagacatccaggaggaatgcatccgttccaacaaaatggaaaaactctatgaaaaggcatacgaatggtatgaggaacaggaaagttcaaacatgcacgactatctggaggagacaagaaagaatatggaaacggacaatttagccggagagtttgaagagcatgaagatgaaatcagggaacttatctacgaccggaacgattccgacccggtaaaggatatgatacgcaactcgtccgtcactaatttcttctattcgctcggagtggaaatcagcggatatctgaccggttgttcactgcggggagaatcagtcgccatggcctgccataaggtacgtcgcgcactgcatctgaaaaaggggcagtttgacgagaagattgaagaactggtagagaatgccacatacggtggagaactgcgcatctacttcaacgccatgtttgacaggctcatcagcaaaggccctgagaacgatttcaagagcatccgtttccacgggaatgtagtggtggtcattgccgacagccggaacggttccggacatcatgtacggattccgctggacatcactttccctttccgaagggagaacctgtttgtcgattcacaggtacactattcctatgccaatgaagtctgcggcatgaccaatgactggtgtgattccacaaaatgggaaacaggcatgataccttttaccggatctgtccgaaaaagccggatggctgaatacaagaaacaggaagccgcttatgagcagacattccgagacgggaaatgcaccttcggtgacatgaactacaaacgccaccgtgacgtgcggtattcgaatgaatatcctgccggatgcaggtgccctcattgcggtacattctggattgactgaaaaaacatttaccaaccaataaattcaaacgatatgaaaatctgctgttcacaagagcattacgacaaggtcgtacagtatgcaaaatcaatcaatgacaagacactggaaaactgtcttgaacgtctaaaacaatgggagaagaacgagaaccgtccatgcgaaatcgaactctattacgatcatgcgccgtattcgttcggattctgcgaacgttatccggacggaaatacaggcattgtcggaggactgctgtatcatggaaatccggacgaatcctttgccgtcaccatggaacgtttccacggatggagcatacatacctgacatatatgcgacagtctgtattggggagcctcatgcaatatggggttccctttttttatgccgcagacatgatgacagcatcctcatttcttgctgcaaaaatagctgtttgccgcgcaactcccgcaaggcggccctgccgggctggttgtctggaaaaaaatcatcctcgcttcgctccggtatttttttccgccaagccttgcagggatgcgggcaaacagacaacagggacaacaagaaataagaatgcctgtaccttacaggcagacaatgtataacaataaatatcagaagtcatgattacagaccagaagacacagaacaggcttcacgcggataccggaacggaactgttctccatcagacaaaggaaggaagccgtcacaaggatgctggacattctgaaagagactccggaatacctgcaggttatgaaccatataccggcttatgccatggatgacgatacgtcagaatggtggaaatcggaagaatcggaaaatttcatgaactcactcctggaagtgatggaaagctatactccggacggatacaggttcggaccgaaatccggcacgactgacctttacggctactgggaaagcaagaccgggcggacaaccctcttccatctgcttttcagtctggaaagcggatatgaatggggaaaaggtctttcccatgagaaaacggacgcattctacaaggaaataaaagagaaatttcatggagaaggattcgacacggacagaaccggctgtacatcacaggccatgtatcttgtaaaaggaaaaacacgcctgtacgtgcatccgatggaaataagcggctactgtgaaacactgcatattccacagattacagccatactgaaaaaaggaggccgtacattccgtcttgtaaaggatacgatagcggaagaggtgtattccttcaccgatgaagaagaactggaatattaccgtgccagatacggaacgtgcatccaccggaatatactggatgccttcagcaaccgccacgcagggaaagaggacatactttccatgatggcatcacggataaatgtggctacgacatcacatctttacggtatcggatatgattcgcctgcatacaggtttgtgcatgaggcatacgacagactggtaaacaatggaaagctgaaggagaatgtccgggaaatcggttgctgcaacatcataatggccatttcaaataccaacgcaatatgagactgaattacaatgacatgctgcttctggcaatatgggaatacaacaggagacaggacgaggatctgaccctggaactgtttcaggaaacattcggacaggttcccggcgcacatttccatgacaaatgggtgcattattacaacaagaacctgctgatgatggccgcctatttcaggggtgaggaagaaaacggccagaaattctgtgatatgatcacccgacaggttgaacgctatacacaaaacaggaggagaacaggatgaatacaaagatacgatatgaccttgacagtcttgaactggcaaacggtgacttcgggtatcccattacagaaaaggaagtacggaaagtgaaccgtatgctggaactgatggagaatgtccgaagcaggcagatgtgcccgacagaaggagactgcgtggaatttgtctcacgttctggtgactatttcggaaaagctcatatagaacggataacaggaaaatatgcggatatatgcctgataccggaaacggtattctgttttgatgacatgggaaaagccgcctatgataccaccggaagtccctggacgcaggtcaatatccggaacatgaaacccgcaggttctgaaatccgcatattcagaacatggggattcgggaagcgcagcaatacgggcagtctcaggttcgatgctccggtcaggaaatgggaatacagagaaccgaatccgttatatgacggttacaccacccgtaactggttccgctatcatatcatgaaacaccgggacagggaaaggacaggcgaatacaccttccgcagcgattcattcacgctgtacagccggagcgagctggacgagctggccgcaatcctgaaaggcagactctacaagggaatcctgcctgactctcttgtactttggggataccgcatggatattaaggaaatatcacgtgaacagtggaacggtatgggacagcacggacaaatccgcatgaaattcatgggatacggtccggtcagaatccacacggacaatgaaaaccataccgtaacagtatacagaatcaacgacatattgtcttcaactatcagaattttcatattttttcagttctttttttgtttcttctattaatattttaagccactccatgatttgtattgcatgttcatgaacagtttcattttggctatcactgtcgtgtagtagcctttgaaaatcacgtaaaatattgtctttcccaagcatctcccatacaggcatcatccggtggattatttttctcatggtctcacggtcggttatcctgtcagcagattccatctcctccagttctttttcagattccataacaacgagagaaagcatatgactataatcatccgtattctccagtaaactggaaaaatcgaattctccggaaactgaaacttgtgtacgagatataatggtggataaaaaagcaagcagtccgtggatattgaacggtttatgaatacagcctacaaatccttctttttcataaattccggaatttccgtcaccacgggcagtcatgactgctactggaacagttctagaattgccgatgtccgaattgcgaagcaatcttaacaaaccgaatccgtcagtatcaggcatttgtacatctgtcaagatcaaatcatattcagaattttcaagagcggccactacttcacgtgcattcttacaggttttacaggatatacctttgcgcccgagcatatcttccgctattttcagttgtataggatcatcgtccactacaagaacattcttaggcaatatagttattgtattatggtccgatttgtcttcctcaactaactcatccgtttcaggcaaagaaagttccagtctgaacatgcttcctttaccgagtacactttctacatccatttttccttccaaaaccttaattaatcctttggtaaggaaaagtcccaaaccaaacccttcagaattgacattctgtgcggcacgctcaaatggagcaaatattcttttcagtgtttcctcatccataccgataccagtatcccttatttcaatacgaagttttccttctgaatattctgaatggaaattgacgttacccctggaagtaaacttaatagcgtttgtaagtagattggctaaaacctgttcaagtttgtccgcatcaccttttactattacatttgatcctttatgttcagaatataaaatcagaccttttgaagtcgctttacgagaaaactcatctgaaattcgttgcaagaaacggtcaagataaaatggtgtgtcgttacgcaaattaccggcttcattgattcggtaagcatccatcaaatcattaaccagatgtaaaacgtgtcgacaagaatgacggatgtcatctaaatatttttcgcgcttcctcttttcacgcgtttcagataccaaatctgcacagttatggatattaccaagtggacctctaatatcatgagaaactgtcaggatgattttcttacgcatatcaagcaaattctcgttttcttgaatagcttgttgtaatttaaatttaattatttcttccttacgtaaatctgattgtataattaaaaatgaaattaatattataaaaaccgcaatactcatcattacgataaataatcgaaaggattcttgtttgacttccgttacctctaagtttcgttctataaatgacagctgtacctgattatctaaaaaagatacaaaatcatataatttttgatttaacagcctattctgcaaacgcaagctatccacataagtttctatctgattgtttcgcatatctatgacagaaaccaatctattattaaaattctgtatttcattagttatataggggacttgtatcgtctccttctttccgaataatccggcaattcctttctttttctgagttattgtcttcacttttactgtttgagtagctattacaggcaattcattagtaagaatactatcagatttattcgcaaattggactgctttcattatttgaaacaagtgcatttctttcgttttaagcaattcccgtaaagaatcaatttgaactggacataaaaaatcacaactccttaattttatttcaagtagaacactatctgttttaaaacgttgattatgaaatatgttataatcagactcatcccatactataactgattcgcctaaagttgccaacttagtaatatacaaatgaactttattagtattctcataagcttcattaatttgaattatcagattctcaagttctttcaaccggcaacgttcatttatcattacagtaaccatacttaagactataaatcctgtaataaaatatccaataaatagtcttttgcgtaataatgaagtcatcaggaacattctattgatttatttgacatcataattctatatatttaactagtcatagtatatatcattctcaaatatttatttcaaattcaagcaataaaataaaaaaacacttcatattacaactgaactcttttatgaaaaagttgaatatatgaagtgtttttttattacgatataaactataaaatcctattcttcgggaactggtgtataaacccttatccagtccaccaggaaggtgtggtcttccacatttttcagttcctcatccgtagggcttaaacctttaacggctctccagctttggtcttccatatttattatgatgtccatgtcttttaccagacctgtaccaccagtgtagttgttggggtcgataatatccttgccgcttacggttctgacaagttctccatctacataatattcaagtgtgaaagggtctttccagaacactcctacacgatgaaaatcgtcgcgccacaatgttcccttgtcatccttataccatgagccaagatctttcggctgataatccttgaatggctggcggatgaatatgtgatggctcaggtgaagtctgtcggcaccgtaacctccgccgtctctgtcgccgccgtatgcttctatgatgtcgatttcctgagtatcgtcagggctgagcatccatacatcggatgccatggttgaatttgaaagttttgcgtatgcctctacataaaccggatactttacacgtgtcttcgatgtgatacatcccgtataggttcccggcagttcctttgtgttgggtccgcttacaactttcttcatggggacatcttcaggacggctggctcttattttaaggtatccgtcggaaacggaaacatggtctctctgccatattgtaggagcaggtcctgtccaatgattatgatagaaatcggtccatttggcatagaactcttttcctttatccttttcgtcggcaacataattaaagtcgtccgactgtggatggagtttccacaccataccgtcgccggcatcagcgggtacaggatagatatcccactcgtacgatttattattgaaatcttctgctgcacaggctatttgcagcgatgctaaacaaatggtaaacagttttctcatcgtggtatcttagtttaagttataataattattttcgttcttttgattcacctttagcggtatgtgtctgcaatgtccaggtagaaaatctcattatgctctgatagtctgaactgttgtatatatgagtaagaccccatctcaatatttcggtaggttctttttcggcatctgcactgcggttcaggccaatggcgtgtggcgcgccttttactactgacattatttcaaagtttattccgtcaggcgaccactggagtgtgttcttttcaggaccgtcggtggtgataagtgaagctatacctcctttgtaaggccatacgcaaacttcatgcccgctgtttgaaataggattatattccgatttcacatacggacccataggattttccgcaatagccactccgtgtttgatttcacggccgccccatgttatttcttctcccatacgttcgcctttgtagtacatatagaacttacctttataaggtattatacacgggtcgtgtaccttatgactgtcgaaatcacctttcgacactaccttgaatctgttatcctcatcgccttcccattcgccggtattagaaggttccagtacaggcttgtctgtcttgatccacggtccttcaggggaatcagcacatgccataccgatagtattctttacacggactgtgtaaggggattttaccgcctgatagcaaagataatactttcctttccattccatcacctcaggagtgaagactgaacggtcgtcgtaagcacctttttcaccacgtttcactgcaattccctgttccttccatgtccatccgtcttttgatgtggcataccatatatcacatctgtcccatgggaaaaccttatctttctctatatctccagcaaatccttgggtaggtccatagctctttgaataccatacataatatgtattacctattttcagcattgcactcgggtctcttcttactacgccctcttcataagcaagatcacctttaagtggttccatcttatactcaaagaaccatttattgtcgtgattttcccatttcatggcacgtttcatagctgcacttaacttatttcccttaggtattcccaatgaatcggccttacgctcatcataattctgagtgtcgtcaacggcaatagtctgtgtattgcctgtatttccgcatgctgccaatagcgacatcatgccggctgcaagaataatttttctcatactagactttattttatattaattgttagtttattcgagtgtaattcacttgtttctgcactgatattcagtaccgatgatttttctgtcgactgaagcatcagcatacatcttccctgatatgtcataatatccttactttgatatggagaaacgttcttcacgtttccattgtctataccaagcagacggtactctccatcaatgttgaacttaagcatctgttctgttgtctttacaggattaccttttttgtctgttagctgagctgtgacatgcagaacatcctttccatttgctgcgatactttgtttgtcaaccgtcagcaatatcgaatgttctttgcctgaagtccttatagctgtagtggtattacctaacttattttttccttttgcggtaatagtgccaggcttgtactgaactgcccatttatagatatgatcctcaaaatcgtctatatacttctttcccatcgacttaccgttaacgaaaagttccacttcatcacaattggaatatatctctactattaccgagtcacctttctgataattccagtgagagtttacatcatcccaaacccataattttctatcccattcatgtcctttcttatcagtaaatccatcttttacatggagatacgaagatttgtctgtagtctgtgaatatatagcaataaaaggcttgtctgtccacaatgatttcatcatgtcgtacgaaggcttcacatagccgcacatatccaggagaccacatcctatcgacttttgaggccattttgaaagacggctttcactttctcccagataatcgactcctgtccatataaacatacccggaacgaaatccctttcaatcaccgccttccattcgtgccactgaccgagattttctgtacccattataggcttgtcaggataattcttcttagcataatcatacatcacgcgacggtagctgaagcctgccacatcgagcgcgtcgatatatcctgactcaaagcttatggaaggcaggatgcagttggcggtaactacacgtgtggtgtccatctggcgtgtccatgcagctaatttttgcgctgtacggccaatgtcgtatgcatgtttaggctggattttccacatttctctgattttttctttagagtatggaggctgattccagaaataattaccgttggaatcggcaccgaagaaacctgtcgcctcgcggcatccggtataagtccattctatttcattacctatactccactggaagatacaggcatgattacggcttctcctcattacgtttttcaaatctctttctgcccattcctggaaatgctcgcaatagccatgcgtaggatagtcttctacagtttccttcatattgagtcttttatctttgggataatcccactcatcgaagaattcttcctgaaccagaagacctatctcatcgcacaaagacagaaactcttccgctcccggattgtgcgagaggcggatggcattgcatcctccttcctttagggttttcagacgccggtaccacacatcgcgtatcattgccgcgccaaccattccggcatcatggtgcaggcatactccttttatcttcatgtttttcccgttaaggaagaaacctttgtctgcatcaaaacggaatgtccgtatgccgaacctgacagtgttttcagaaattacttcatcgccattcttgatgcgtgtctcggctgtatagaggacaggtgtatcgacgctccacaaatcaggctgtttaatctcagatacgatgtcgataattttctcctcaccagcattcagttttatactgaagacctcaaaggctgcgatattgcctttattatccttatatactacctcaacaactgcagctctgggttcggagtagctgttgcacacggtaacctggttgtttactttagcatatttatcagtaaccacgggagtagtgacaaatgttccccaaaccggaatatgcagtctgtcggttacaatcattttcacatccctgtatatacctgaaccggtgtaccatctgctgtcggcataatggctgtggtcgacccttacagtcatacggttatcctcattgggattgagatagtctgtgacatcaaaataaaaaggagcatatcccgaaggatgatatccaagctttttgccatttatccaatactcagaattattatatactccatcgaacactatatagcatttctgatttgcactgattgttgtgggaaatgatttgctataccatcctattcctccctgaaggaaagctacacatccttcacccgaaatggaatcgtaaggtaaaccaacactccagtcatgtggcaggttcactttcttccattcatcaccagggacataagaagtatatgaataatgagcagaatctttcagtacgaatttccaatctttattgaaatcaacatttgaatcagatgctgaaacctttagggttgataataggattattaaagctaaaagatttttatttctcataatcttaggttttacatgttttttgatgtcacaaaactatatctttcacttataatatatgagggggatattaatgtgatatagggtgggaaatcagaattttacatctgccctgtattccaccgtcacctacaaccttgacaaaggatgttcctttcttccctcttatggttctcaggacaaacagacactttccgttatatgtccttacactattgtttatgacgttgatgttcaaatcttctatcgaaggcgatccattgtcgagtccggcaagttcaagcttgtcgtcgaggattatcctcacatccgaaggtatatcgactactgtgtttccttctttatcttcaatggatacttctacatggataaggtcataaccgttgtcggtagctgttttgcggtcgcagttcagtgccagacggcacggcttgccgcttgtggacaaagtgtctttcgacaatattctgtcgccgtccttgcctaccgcaaggagtgttccttccttgtatgccaccttccacatcagtatattatgctccatgaaatcgctgcgtttctttgttcccaacgatttgccgttcagaaacagttccacttctggggcgttggtatatacctgcaccagtatgtcctcgtccctgcggtacttccatttatcgcgtgtgtcgtaccactcccagcgtctgatccatcccgggcgtggagtgtaggtgaaacttccgtcagtatccatcttgaactcgctttccttttcaggtattgttacaatatgggttttcggtgtgtctttccacagacattcaaagaaatggccacgcgctgtcttgttgcccacgaaatcgaagaaagaacagtctccaccccttgcaggccatgggccgttctcgccaagatagtcgaatcctgtccacacgaagatgcccgctatgtacttcttgtcggccacggctgtccattcaaagagctgaccaacattctccgaaccgataataggctgatatggatatagcttatggtcgatttcataatatttgtctttatagttatatcccactacatcaagaacgtctgtatatccggagagacgcgaaactgacggaacaacgactcctgaagagacgggacgggtagtgtccacatccttaacccaaccggcaaggacagcggctgtttcagccaaatcgtcttttcctcctgacagacggttgaactctttcagtatagacttgttgtctgtttccgggtcgcccgtatggataagacccttgaaccctttattgtctttgctcgatgcccagtaatatggataggtccattctatttcattgcctatactccagagtatcacgcaaggatgatttctgtctcgcctgatgaacgacttgaggtcgtgctcggcatgcgtatcgaagtatctggtatatcctattgatatgctgtcgggcgcatcttccttagctcgctcagtaatccactttttctttgccaccttccattcgtcgataaattcattcattacaagaagtcccagactgtcgcacatttccagcagactttccgaatgcggattatgggctgtacgtatggcattgcagcctatggaacgaagtttcagaaggcgtcgcaacagggcatcatcgtatgcggcaacacccatacatcccaagtcgtggtgtatgttcactccttttatttttactgattttccgtttagaaggaagccttcatccgcatcgaatttaatgtcgcggataccaaattttgttgttttcttatccatcacatatccgtcagaagcaatcagagtagtatgaagctcatacatcgaaggcgtttcaagactccagagatgacaattctccagttcaacagatgcagtgaactcattgaaatcgcctttcagggcaacaaaatcatcggaaacagaagctattgtcttgccgtcgtacactacttcgtgcttcacggtgactccttttacacctgttccagcattcttcacctcgcataccacattcaccatcgaacggttgcctacctgtggtgtggtaacgaatattccgtctgaaggaatatagagctcgtttcttagaataagactcacattcctgtatataccggcaccgacataccatctgctatcggcatacgctcttctgtcaacgcagacagttattgtattcatcgaaccttttggtttcagatattgagtaagttcatattcaaatcccacatatccgttaggacggaatcccaacatatgcccgtttatccaaacctttgagttattatatacaccttcgaaatgaatgaacacttttttcccattcatatcatccgaggtgagaaaattcttcatgtaaatccccacaccgccagacagaaaaccattgcttccggctgtctgagtcttggtatatccttcgctgatactccagtcatgaggcagacacacatcctcccactttatatctggactcaggaacaaagtgtcctgaggcacgaaacctgctggtttgctgaatttccaatcgaagttgaaatccactttagtggaggttccggcataacagaatccggacagaaagatagttaagactgtgataatgttttttatggtcatatcgattttcagattaatattaatgacaaaaataatttcaaaagtgtaaaaacaaaaaaactctccatttatatttcagatatcaacggagagtttcatcattaaaaaaaataaaacattttataaagttactccttgcttaaggatagctatttcccggtatcccttcttttcgttcagtgcctgctttccgcttgccacttccaccacaaagtctataaaacgtctgcttaaagattccatgctttctccctctaccagagttccggcattgaaatcaatccacgtatgtttctgttcataaagcggagtgttggtcgaaaccttcacggttggaacgaatgttccgaacggtgttccgcggcctgttgtgaacagcacgatatggcatccggcagaagcaagagccgtacttgccactaggtcgttgcctggtgcgctcaacaggttaagtccgtgtgttgtgacacggtcgccatatttcagaacatcctccaccatcgagcttcccgacttctgtgtacatcccaatgatttctcctcaagcgtggaaatacctcccgccttgtttcccggtgaaggattttcatatattggctggtcgttgcggatgaagtagttcttgaagtcgtttatcatggccactgtgtcgtcgaatatctccttcgtgcggcaacggttcatgagcagtgtctcggctccgaacatttcaggtacctccgtgaggactgttgtcccaccctgggcaacaagatagtcagagaacaccccaagcatcggattggccgtgataccggacagtccatcagacccgccgcacttgagtcctatacgcagttttgacagggggacatcagtccgcttgtcttccctggctatggcatacatctcacggagaagtttcataccctcttctatctcatcatctactttctgagaaacaaggaaacggatcctttgggtatcatagtcacctataaactcacgaaaggcatcaggctggttgttctcacagccaagacctacgacaaggacagctccggcattgggatgaaggaccatgtcacgcaatatcttacgggtgttctcatggtcgtcacccaactgcgagcatccgtagttatgagggaaagatataatggagtcaaccccctcgcaacctgtttccttgcgaagctgctcggccaactggtttactattccgttcacgcaacccaccgtagggataatccatatctcattacgtatgccggcttctccgttagcacgcaaataccctttgaatgtatggttctcgttcgtgaatgtctgtttctcgaacttcggagtgtaagtgtatgtactcagaccggaaaggttcgtcttgacggttttctcgttcagcagatgtcctttcctgacttcctttacagcgtgcgatatggggaaaccgtattttatcaccatatcaccttctgcaaaatccttcagggcaatcttatgaccggcaggtatatcctccattaattctatggaattgccgttcacctctattacagtccctttggacaatgggtgcagtgccacagccacattgtccgcagggtttatctggatatattcagtcataacaaactaacatttataaattgaagaatacaggtagaagtatcaacctacaaggtcttttactgtctgaagcattccttcgctctggattttgttgatatagtaaattacacggtctgccagtcccgagatagtattaaggtcttcaccccaaatggaagtatcggcgagaactgtcttcacaagattttctaccgagccatcgttccacaaacttgtaagcatcgccatgatttcctgtgcatcgttaggaactatctctacaccatcggcacgctttccacctttgtagtatactatgatggctgcaagaccgagtacaagtccttcaggaagcacacccttacgtttcagatattccttcactcctggaaggtcgcgtgtggcatacttagggaatgagttaagcatgattgatgttacctgatggtctacgaaaggattattgaaacgttccaggacatcatcggcaaacttcttgagttcctctttcggcaggttgagggtctccatcagctcgtcgaacatcacacgtttgatgaacttgcctatcacctcatgttggcatgcgtctctcacgatattgacgcccgaaaggaatgccaccggcgacaatacagtgtgaggaccgttcagcagagtaaccttgcgttcatgataaggctcctccgacgggacgaacagaacgttcagtcccgccttgtttgcaggaaattcttcggcaaccgattccggtgcttcgataacccacagatgaaaagcctcgccctgtacaactaaattgtcatcaaagtatagtttagtttttatgttgtctatgtctttacgagggaaacccggtacgatacggtccaccagtgtggcatatacaccacatgcagtttcaaaccatgacttgaactcttcgccaaggttccacaattcaatatactgatagattgtttccttcagtttgtgaccgttgaggaagataagctcgcatgggaagatgatgagtcctttcgacttgtcaccgttgaaatgtttgaatctgtgataaagcaactgtgtcagcttgcccggataagagcttgcaggagcatcctcaagcttgcacgacggatcgaagttgataccggcctcagtagtgttcgagattacgaatctcatatcaggctgttccgccagtgccatgaagtcattatactggctgtatggattcagcgcgcggctgatgacatcaatcattctgaatgagttcaccacctcgccattgttcagtccctgaagattgacatgatacagacagtcctgggcattgagggcatcaaccatacctttttctataggctgcaccacaacaacactgctgttgaaatctgtcttttcattcatattcgagataatccagtcgacaaacgcacgaaggaaattaccttcgccaaactgtatgatacgttccggacgtactgcctttactgcagtcttactatttaaagctttcattgtaatgccaaaaaattaaaattgataagattaaaattcaaccaacattctgaataccttacctggattttccgaccatttctgcagagcctcgcctgcctcttcaggtttcactacggcagagataagttcgttcatcgggcagttgccattctgaagataatgtatcacggcacggaaatcctcaggcattgcattgcgcgaaccgcgtatgtcgagttccttctggacaaaatattttgtctggaaagccacttcactcttggcatagccgatacatgccacacggcctgtgaaacctacaatgtcgatggcagtaacatatgtgataggactacccacagcctctatcaccacatcagccatatagccgtcagtaagttcccttactctttccaccacattttcagtcttcgaattgataaccatcgaagcacccaggcgttttgccagttcaagcttctcatcgtcaatatccaatgctattacccttgcgccacgaagcgatgctcttactatggcgccaagtccaatcattccgcaaccaatcacggccacagtatcaatgtcagttacctgagctctcgacacggcatggaaacctacgctcataggctcaatcagcgcacattccttatccgaaagaccggcagccggaataacctttgtccaagggaggacaaggaactcctgcatagaaccgttacgctgaacacccaaagtctcgttgtgttcgcaggcattcacacgtccgttgcggcatgaagcacactttccgcagttggtatatggatttactgtcacgttcattcccttctcgaaaccgacaggaacgccttcgcctatttcctctatcacagcacccacttcatgtcccgggatgacaggcatcttcaccataggatttcttcccaggtaagtattaaggtcggaaccacagaatccgacatatttgatacgaagtaaaatttctccggctccaagtgttggtttaactatatcagctacttgaacctttccggcttcagtaatttgtacagctttcataatctatgtatttatttaaatttgttattgtattattttgatgttgcattaattcaatgttgttttttctctatcttatatcctctccagccataatatgccgtaaagaagaaacatatcagaggtattacatatgccacctgatagaagtccgcgttatgattcatcacaaatgcggtgaactgagggatgcacgcattacctataatagccatcacaaggaatgccgaaccactctttgtgtcctcgccaaggtcgcgtagtgcaagtgagaactgggttggatacattatcgacatgaagaacgacactgcaagcatggcataaagtcctgtcataccaccgaacatgataattactccacacagtatgatatttactatagcgtatgtaagcagcatatcctgaggtctgaatttcgacattagcatagtacctatccatctgccgccaaggaaagccagcatatacagtccgaagaatgtggtcgcctcatcctccgacagacctgcatacatgcagcagtaaactaggaacaggctgttgatggctgtctgccctccgttatagaagaactgtgcgataactccccatctcaggtgtttgcgtttcaacactgcaaaattgataagcttgcccttctcgccgtgcgattcctccttgtcaatatcaggcaacttatacagtgcaaacaccacagcaagaataatcagcaggactgcaagaaccagataaggcatcttcatggagtctgtctccatctgaataaatccgtcccaacctccgggaaagtcggcaggcagagtctcgcgagtatagttctgtccggtaagtataagcttactcagaaacattgcggatatgaaagcaccaagaccgttgaacgactgtgcaagattcagtcttcttgaagccgtatcgtgtgtacccagagctgtcacatacggattggcagcagtttcgaggaagcacattcccgttgccatgatgaagaagattacaagatatgcccagtattcctttatctcggctgcagggaagaaaagcagaccaccgatggctgcaagaatgagaccgacaattatacccgacttatagctgaaacgtttcatgaacattgctatcggtatgggaaacaggaagtaggccagccaataggcagcttcagtgaacgaggcctcaaaagcattcagttcacaggttttcatcaactgcctgatcattgtaggcaatagattactgctgatagcccacatgaagaacaagctgaatatcagtaaaagcggtataaaatatttgtttttcattctgacatgtttttaatataaggtaactcaggcagattcttgaaaccgtaaaaggctttcgcgttctcgcccaagaaaagttttttgcttctctcttccaattcttttgatttaatcacaaagtcgtacgacatcttgtaggtaatggctgtgattgtgcgtggatagtcggaaccccacatcagtttctcgaagccaacaaggtcggcagcttcgttgatggctctgacagcgctgcggaacggatagaactcgtcattgaacagccaagtgataccgcccgactcaatcatcacattcttatgacgggcaagcattatctgcttcttccaatccggtttagtcaccataccgaaatgcccgatggcaatcttcaagtacggacattctgaaatgatttcttccatctcgcccacctggaggtctccctctgccatatctatggaaagaatcacccccttgtcttccattagatgaaacatcctcatcatctcgtccgagttgagcatcaccctaccgtccttcagttgcaggcggtgtcccggaatctttatggccttgaaccctttgtctataagttcaaccgcctggttatagaaacccggttttctgaattcacacataccacacacgaagaacctgtccggatatttcgtcatcacctccatcagatagtcattctgaatgccgtcgatatactcctgtgtgacaacagccgcgccaatcagggcataattcatattagccaggaaaacctcagccgtgtttcttccgtcaatcataaagggggggggagcatttgtctcacctcccccataaacaatgattgaccgttctctgtagtcttgattttcaggccatctacttcagtgtcctgataaagccacagatgcgaatgggcgtcaattattgtataatccatagaaacagtatttatgaatttgcccaacttactctttgctgatcgcctattatctccttaaccttttccacaaggctccagtctatcggttcctcaatgtattttatgttctgaagcacagactctgttcttgccgagctgaacaatgttgtaggtattctcggattgcttacagagaactgcaccgcaagtttctcgatagggtatccctgttcagcacaatacttggcagcctttgcacacacctcaatcaatggttttggagccggatgccattcaggaacacctctatgtgtgagaagtcccataccgaacggcgaagcgtttatcactcccacaccattttcgtcaaaatagtcgaggaagtccaccagcttgtcgtcgttcaatgaatagtgacagaagttaagcaccgcctctactgtacccggagcggcatggtcgataatccatttcaggttttcgagctgcaggtcggtgatacccacgtggcccaccacgcctttcttcttcagttccaccagagcaggcaatgtctcgttcaccacctggttcatatccgagaactcaacgtcgtgaacgttgataaggtcgatatagtcgatgttcagacgttccatactttcgtaaacactctcctgagcgcgtttgtccgagtagtcccacgtattcacaccgtccttgccatagcgtcccacctttgtagaaaggatgaacgattctcttggcaattccttcagagccttacccaatacggtttcggctttataatgtccgtaatatggagaaacatcaataaagttcagtccgcgttccactgctgtaaaaacagactgtatagcgtcactttctttgatagaatgaaaaactccgcccaatgaagatgcgccataactcaatacaggaaccttaagtcctgtctttcccaattcacgatattccatttttgataaataatttaaaggttaatattttttactctgtttattcttattcatacagatagaacatacgttccatcatcttccatttctcgtccgatgtggccccctcggcacactgctggaatttggctacgtattcttcccattcggcctgacgcggcagagtggcaagctttgccatagctgtatcccagtcaaaatccagaggtgtttccactatcataaagagttttgaccccaatatgtatatttccatttccaggattcccacctcgcgtattccggcgcgtatctcaggccatgcctcttccttactgtgagcctttctgtaggcttcaatcaattccggattctcacgcagactcaatgtctgacagtatctcttcacaggcagggaataacttttcactttatatccttctgtcttcatgatattattgatattaatatgttagtattacatgtcactgtctttatcttttcgacgatgctaaagtatgaagtatccatcaaaacaatagaggagattttcaaaaaagaaagaggggatattataccccctctttttcgacatttttacccctcataaaggagataaaaagtcaccccaaactctataaaaaatcaaaacagattgaactgcattcctgtgtagaaaaatccctggttggatttcggattccaatacgtcatcaccgtcaacgggatttcatattccataatccgaagtttataaatcacattcagggacacctgagtaattcctgccgattcggcatacatggttctgttcaccatttccccgctttcatttcttgaatttctcaatgcgaaagctgttccaataccaggaccgacccttagcttttcgttctgatagatggtatagcccacatatacgaaactggagtagatgttcttgctgttgtccagatccctgtcgcgaccgtaaacaagtgtagagaagctcaactccagcggaaatttcctgtcgcccgtataattgaccatgagatcaacgaaacgtccagtttcatcaggcttatagttgaagaactccttattattatatgtagccccgggcgagaaattatatgtatctatagcctttatctgaaacctgccatgagtatatgctatatactggctcagctccttataactccccctggtgttcgatccgccaaggaaaccggcggtaaacctccccgatgggtcggaaaccgacaaatcggacgagagaatcagtccgtcggccacttcaatgccacgccatagaatcatgttctgtagagtagtactgaaatgaagctgagcctgaacatttgctgacaaaaatataaatacaggaattaacagtcgctttttatacttacaggtatccaatgataatatatgtatcatactcagagcagtagaaaatcggttttaaattattattatggatttatttgtcgaaatactctataagattataaacattccagttaatatccgacatgtatttggtcaatgatgtataaggtttatagttataatcgagcatacctttattgcaatcctcatcatccagatacttgaagaaaacccatcctacacaattcttggcttcgagcagtcccaaggtaaaatgctggtaagcgaatccacggttttgctggtcgcgtaccacgaaaccagctccacttgaattgtcaagcttagtatcctcacccttggtatagaattccgttaccatgaaaggagtaccgcccgcctggttcttccagccatccatgtagcctttttcaggcgaccatttactataataatttatggaaatgacatcacaatattttcccgctgccttaattatataactgttgtatttaggaaggctgtgcaggcgtgaacccagataaagcaattcaggatccttcgatgccttaaccgcattctttatggcagaataatatttttccgcacaaataccggcaaactcattgttcagttcatccgttacatcagaaacatttgcactcttgtccttatccgtcataaacttggcggctgcaatataagcaggatcctgcttgtttgaaattttcaggaatctgtcgagcagcctgtttccccatgtagagaagtctatctcattatccgagaagaatcccaacacatccgggttgtttctgaacatgccgaaagcatccgaattgagatactccttgcaccattcatcccatccatcataaaacacaagacctatcttaagattcacgttctgccccggatagctaattcccttgctattcttgaactctgcaaggaatgaaaaggaaggagcctgtgtcagaggacttgaagccgatttattataatcatttacagccttgtcgccttcttccttaccgaaagcgcagacactatgaaatcctatttcagagaattgtttctgcgactttgccacccagtcatctactgaactgtaaagcttgccgaaagctgagctgttgccatccattctgaatgaggcgataccccttacataatatggataaccttcggggtcgactatccaacttcttccatttgagtttttctcaaccctgaaccgtccagtagccttggatttttgcccttttgcgtatgagccatatttattcacgctttgcaaatactcatcctgtgtttttgtctgctgttcataaccaaccaggtatggcaatatccttgtctttgcctctataaaagccttgtcaggtttttccgcatactcgacaattatcggttgatactgcttggtgctattaggataggtttcagcaggaccgggaacaggcagttgcagttctacatcatcatcgtcattatcgcctgcattgtcgccgggagtattatagtcctccacattccccggttgtgagtaaataacctcaggcggaatatatgagaactcctcctgagggtcttcacatgacaaagcgaagaacggaacactcaagcaaatggttttagtaataatagtagaatatttcattgttgcaaatatttagtaaattaatataaatcccatgtcctgattgtatccccccatcggtggtctatcgggaactccatttctccccatgccttaacagaagtccaaggttggtcggcatcagtccagaatgggtcagaggcaggcaatcccaacggaaggaatgcaagtgtagtcatatacaggctgccattgtttgtataatgattcgaaatgccagtctgatgtccgcagaatcctatggtgaggaatccgccctcattgaagttattgcccgacttgaacatacgtttcatacacgctgtcagcgcacatctcacctgtgctttcgatactcccgccggcaactcattataccatgctataagagccagtggctgcattgttgccatacggtaaggtatagagcgtccgaaaacagggaatgttccttcaggagatatgaaacgctccagaatcatggcgaacctctgtgccctcatcaatgccctgtcatagtacttgcgatagtcgaaacgtgtcctcacgcccgattccattattgcatgtatagattcgagatacataggatggaacacataactgctataataatcgaatgcaaagtgctgtccgtctgcgtaccatccgtcgcctacataccattcctccaccttgcggaaagtagaatttatacgatatgtatcctgtccggcatcaattttggcaaggaagctttcaatggtggccgagaacagcagccagttagtgtaaggagggtcaatgcgtcggagacctttgaactcttttatgtagcgttcctttgttgtctggtccagcggtttccacagctggtcgaacgcgcgcaggaaactttccgcaatataggcagcatcaaccagtgcctgaccatgaccgttccacaacagataatccggactattagggtccaccgcatttgcataactcttcaatgcccattctttcagttgcttgcgctgctgtccttctgctgtatcatcgtcaggcaggctcaaccatggagctataccggccatgagacgtccgaaagtttccatatatgcaaccttcttgttacggttatcccagtttggacttacctcaagaatcatatttttctgcagttcccctttcgccatattgctcaacacaggagcagccatcctgtaagccatatccgtccagtattttcttgtctcgttgttgtttgcctcgagataacgcacatactcgcaagcggcaagaaggaatgcgcctaccccaaagttggcagtcgacttggcgtcaaccacctgtcccggaatagccttttcaccgattggctggacataacccaccgaccagtctttctgcagtgcagtcttggtaagatatttccatgctttccccactacaggcataaattcatccttgtcaagataaccgttgtttatcccccaaagcataccgtaagtgaagaaagcggtaccgcttgtttccggtcccggagcatgttccggatccatcatacttcttgtccagtagccctccggctgctgcagacatgcaaccgcctttgccatacgcacaaacttatcctcgaaaaaagacagatgctcataaccctccggcaggtccttcagcacctttgccagagcggcaagcacccatccgtcgcctcttgcccagaaatccttctttccgttcagactcttatgcttgggataaacatattttgcgtcgcgataatagagtccttcctcctcatcatacattattgagtccgacgtacaaagatattcatacagtttcttaagataccggtgattatgcgtaatcttatacatcttcgtcattaccggcatcaccatataaagtccgtcgctccaccaccagtaatccttacgcggtgtgctcatctggtactccatgacttcgcgtgcacgcttgattttataattctccggcatgacgttatacaagtccgcataagtctggaagcacacctgataatcgccgaacagcacataatcatcctttaccccgtatttatacttccattcagatttgttgttgcttttcgcacccatccactggttatactcagcccatgcctccgaatactttctgtattcttctttcccagtaaggaaataggcttccatattaccggtgtgatatgccgcataatcccagaaagaccttgcttcgggggcatgatttttctgccaggcatcgttcactttttcaatcatctccctaacttgctgagcctcagtttttttttgcgaaggaaaatgaaggtaaaacagctataaggatgtataacatccagtagtatctataacagttcatctttgtgatattgtttacattttctaaaacgaaatggggaagaatatatattcctccctcatttcacgaataattgtattattatatttatttgttaggagtccattctgctccgttgttgaaaccttctgttgtagagtcaaaacttgcatctgctcctgtacttggtctttctgtaatttcttcaatcttaaaagaagtgattttagcggttccagtagcatcagtaccaccagggacattagtctgtacagttaaaataacgttctcaagaaccggccacacaagtgaaccatctgctcttgaagctggagtttcagcagaagtagaactactgattgtgaatgtatttgtataggttccacttccggtatttcttccaatccagaatttatatttatcagatgctcccaatctgaatgttgttgcacagtcgttagatgcgtatgtataagtaaatttgtaagtacaaccatcacggaatgacattgatttagtaactgggaattgattatctgctggaacaatttccaattctccacttgcattaattttttcggcaactccttctgcaagatattccttaactgcatctatgttagcgaagttaaaatcaaaagcatctgcatgagtcaaagcaacattggcagattcaatcttgatattagcatcttcgttgttttcgtttttagcagtcaaagcactaacagcataatcagtgttataacttacgctaatatttgcgtcattactataaatcttatcaccaagaataagagtcatagtagttccattcacagaaccggaagcaacaggaattgtttttcctgctactgttatggtaaatgctttgttaacagcatcagtgaatgttccagaaacttccttatcgagtgtaagttcaattcggtcattacctgttgtctgatcaggaacaatttctttagctgaagaaacggcaacagtagtttgtttttccaaatccacaggaggttcaccgcctccttgatcatcattcaatactatcgttacaatctgtcctttagtaactataaggttttcaccactgaagttataagttttagtaccagaatttcttgtaagttctaaagtaaatccatcggtaaatgtcaccggagctacaaccattgagtattccttggcatttttattttgttcattaggaccaacaaatgttccctctttagcggttagagttataacattagaaccggattccactgtcaggtttgctgaagcatcaatttttacgttccctgcaatctttacatcaccaccagcagtaagtttaatacctgtaaggtcagtaagattatttttaaacttaaccaatccacaagtattctggaaagttaaagatttgttattatctgttgcagtagcataagatatatttgcatttgcatcgaatccccaagccggagctgtctgttcagatggcagtgtagtagttacgacaccttcaagacacacagcttcggcattataaggataaagagctgtatatgaattgttaggtgtagccttacctgtaaacgttgtaactgtgctaccacctgtagcggtagtaaacttgttattttcttggcctgaaaagatattgattgcatctcctgttgtccaccacaccgttgttccattctgcaacgaactacggcttgaaggcgtaccggcaacaaaagtcatatcctgaggaccactgactgcatttacattcgacagttcgtcttttgtacaagactggagcattgcaatactcatcaaagccgctccacaaaatagcatcgtatttttcatgacataaattatttgttaaacagtttcaataataaaaaatcacatcacttgttattcatattcttattctttaggatcaggtttccattcagtaccgtcatcttcaaaatcatcatgaccgccatctacaattccgggaggtattgatattcggcataccgcactttttattccattacccgtatctacagaagcaccgatattagaatctctgcccccgtcgattgccacgaccgtacatctcattttatcgtccgatggtgtaatcatcaacacatcagggaaagaagttccccaaactattgacttgtaaccggtataagggagattatccttggttatattaatacccaactccacagtgccactatatggtaattctatataactgacaggtttgttgtcagtctgcccatccttgaacactacatattcaatttttatctcctcagctggtgttccatcacctccacctacgccatcatcatccttatcacacgagattgccgtaaactgtataaaaagaagtatgaaaaggttgtatactgacagaatccgtggttttatatcaaccataataaaatgttatttaagcgccaaacaaaattttcaatattcaaaaggcataagaggaaaccctgaatatgccttattaccatgaaaacaaatcaatctacctttttcaatccggaatcagaaaaatatgttatttatttagaacatatttttccgatttgccagattacaatcacaataaataaatcaacaactaaatctaattacctaatcttataactaaaccctcaaacaatgttatttaaccttttctatcttgacatcatcaagcaggaagcatccaccattacctgaacccggaacagctgtgaaacgatatacaaaaccattttcctgcaatttgaatttaactgttgtaagattgtaattcttacggtctttcttgacctcagcagtggcaatttcttccagtttctttgaatccggattatagtactcaatcctgaagttaggtttgtcaccccaactgtatttggtataagctgaaatctgatattctgctccagtttcatagctgatgtttacagcctgccacataccaaccttcacctcaacagcatagttgcctgaatgtgcctttttcgcatcaactattttgttatctttcttttcccagacattccatgatgtcaagtcacctgactcaaaatcaccgttcttaatttcctgagcgtatgcagaagtcatcatcattccgcaagccatcattgctaaaatttcttttttcattttttctaaggtttttaatttaagtattatgttgtatctattaaaatcactcttctattggaaccaacttataagccctgacccagtcataataagtagtacttttgtccttatccttcaagtcctcagctgtaggtacttgtttttcccaatcgtatgtttcagtaactatatgtatgaacataggtcggtcaaacggagtatctgtatattttgttgtaggcttgatagtgtacatatactttccgtcataatagaatttcacggtatttgcatccacccaccaacaaccgtaagtatggaaatcttctgccgatgggtccgtcatatacgaaaccacatccgaacgtttcgccgtattgtcagtacgtttgcctccttgttcctgataccaatagtgagtattactgttcatctgcatattccatgtcttgttccacggattatcagggttgacacttcttattatacccattgtttctataatatcaagttcctgactgctccatgtctttatcttcttgccgcctttcattatttccttcattaccgggcggttggaaagccaaaaagtagacgacatggtagtgagcgaagccttcatccttgtttcataatacccataatgtgcctggttctttgcagaagcaaccgctccaccggcaagacgatatttatcgcccggctttccatcaagtccttctgttggcgacaaaacggtattgattatacgaagacaacctttcttgacactaacattctctgccttgaaagttgcaggcggccgaccgttagtccaataaggacttttagcatgccatttagcggcattaagacgtttaccattgaattcatcagtataatcttcgttaactacccatttataaccctcaggagcctcaggcaaattttttatatgctcttcagccaaagaatattccttatcattttttaatgtataagatgacaggaataaagatgcagcagataaatacaatactgtttttctcataaactttgtcgttttagattttttgttacacgacaaaagtatataagtttcatgaaagcattaagggggatttacatcgtaaaaggtggggtaaaattctaccactccctgaaacacaattatttcactcatgaaaccatgtgtttttacgatatataaaacccgacagaagaataataccgtattaccggctaatttacataagaataacttttcaaaccgccatataccccactttacgtccgtaccctcagtcctcgactccggcaatatgttttccatatcgagatctatggttttctgcctcggattcaaccactaactgtcgagcatgtggattgcgtatctgtcatagaatctctttccgaaccatattatctcgtctgtgctaagtatgttgttcagacggataatctttccggtattttaccacctacttctcttgcaaatcctgatctgatataaccggatactctcaattcattgatttccgacttgtatacagtctgcgaagaggcattgaaactactgcacagactgaacagcagcaggggaataatttaactgattttaatagtagacattctgtgttcataatatttcattttaatgattacgtttctgactttcgtctgatgcaaaattatgaggtatcggacggggttgtatctttcagtaaaaatcagtaaagtcttggcaaggggtaaaaaacttaacatcttgtatataaatatattacaaacaaggtgcaaagattttcagtaaacgatggcgaatacagaacctatatatttacacgccataaaatgaagaaaaagcagtaggaaaaaaatgcgggcaagttccggataaaatgtgggcaagtttaaggtaaaacttgcccgcattttagatagaatgcgatcgcatttaaaacaagtaaaaaacgaagaaaaaaaatatgtgttcttcacagaacacatatttcaaaaataggtataaacacgctaaacaatgttaacaaaatctatttataaaaaaagctcacatcaataatatctgcaacatttttacaatactccataaatgaagagaccttgggatgatttatacacagagctatctgtgatgtaggcgaaaaacgtcctgtcccgtcaagaaacgctgtaagctcagatgggaggagtatactgccaatacctggatttacgtcagtcagaacgactgtatttacagcttccaccgctgacacatcaagataatcgagtgccggaagatctgcgaagtgcaattttcctatcatattgccgcctttgctgccctgaagagagacactctccaatgaagaacaaccggatatatggatttcactgtcgaatattgaagtttcggaaacatcatcattaagtataacagaaggaacaactaccaattgaagcgaactgttattctccaccctaagtactttcaatgatgatgcggaacttaaatccattcccaaaggtgtatcaatattagagattgaaaatactgaaactcccgaagacggcttgacatacgacatggaataatgcttggacttcactcccgaaatgtctacttttcctctgaaaccgggatttgacaatatatactccacaccctcaaggttagctgtctgcgacaggaaaatgaggtcgttcccttcggttatcctcttcgtgacatcaatctccaacgatgagacaaacaccgacgggaagtttctgtaaagatatgaacggagcaaaggatccggtactcttcggtttactgtatattcagtgtaatttccatcctcgtccgacatcacgacaagacatttgtccgtcatggctttatagaatgcaggtatgacatctgtattccattttgcaaagtaaggaagtttcagatttgtaagacttttacaaagcaccgtagtgccatcggttgaaataagattgagatacgaagttatgccgtcattgccgcgtaaagctaccgattttattccttcgggcaggtcagcaaagtcgaatatagaaaaactgttacactcaagattgacatctgcgagcgaaggaaaactcctcaaaccgctaatagatgtaagttcgcatctactcaagtccaaagaagtggtattgagaacttgattgtcacaaatcagctctccgttttcgctgaaattaaatcctttccgggtcaagacatcgcgtaactttgtatcaaaagtcacttcagacacttcaaagtcggaaatttctgtttcatccttacacgagattattgtgaaacagagaactatcagtacataaaagctaataaaattcctcataacaatcagttttgtggtaataagactatattatcaatccaagccgcgtcgttctgtctttcgcacacaatggcacacactacttttttcactgtagaattaaaatcgaaagatacggctttataattgccgggagaagaaaattcctctgtatataccgttcctgtagacatatcctgtagcatgactttcaacttacatgctccttcggtctttacatcagcagagaagcgataagtcctgccactctccatgtcaaccctctgcatgagtcctgcatgaccagatatacaggctacattattgcctgcattgtcagtctgtacgcaaaccgtaccatagttacccaatggctgccatgctgaaagtccttcgctgaaggttccattctgcaaggtagagacagtatatttctcaacctgcagtatcatggacgatacgtgacctcctccgtcggaaaaggtgatgtcgacattattatcgccattcttcagcagctgtatgtcgaacggtacttctatcataccgaaaaatatattgcggttgctctggccgtagcctttccagttgtcgggaacactcacagcggtaccattaatctttaccaccggtttcttggaagcagagacaggacggcctatcgacatacgcaagcttgctctgcccgaaccggactcgattcctgtgaaggggaacgaaagggatgatccggcggaaatcggtttcagatactcactgctgtaatatttattgcggattatggagttcgtgaatgctgacgaagacacatctgctacaaggactatggtctgatttgggacaattgagatgctttcaggcatggacgggacattctgttccgtatattctatacctgcgttataattgacatatagagaacgctttgtgacattcgatacatccttccagctattcttattgttcagatatacagtctgcgggttatcatcaagattatcaagggcgatatagagtctgcctccatccttgaatgcctgtacctgaatatcaggattactgctggttatatcaacacgttcgccttttacattcttccagagttcgaagaaatattttttgtcattaagcctccatgtggtattcttcagattctgaggattgtcgggaataaacagtgccgcactatatgaagtataattgtttgcagcggtgatatgccactcagccttatctgagacaaaaggtattgagataaacaaattgtcctgacgttccatcagattaaacagaaaatgattaaacgacgaaacactccgcacactgcttatgtcatcatagctgtcgtcgggcttgctgttgtcaatacctccaaactcggaaatggcaagaggcttgacatgtccgaacttaatataggaatacgcctcaaccatatcaagaactgcttcggagttacttcctgaacgtttcgtatcggtgccggttacatttattccatcataaagatgtacagagaatccatccatatatgcacctgcccgatcgatgaacattttcatgcgggtgttccagtaattgaagttcccatcctcccaggcggggtaggctgcggcatagcctatcaccttcatctttccgttaagacgcggattattgtgtatatgtttacctattgaagcataaaaatcgaccatcagttcgcgcatagcctgtccctgaacggtaaaaccggcatcatttgcatgaacgaacggttcattgaggggttcaaaaaactcaggtaccagctcgctgttggaataatactcagccgaccatgcacctgcagcctgaacgtctatgccgccctgtatgtgctgtacatagggatgctctgtggcaatatatctttttacggaaatatttccgctgtatggtttcatctgaggatatttgcctacctcatgcgtcttgttatacgcatacgagtatggtccccagaactttcttccaagaccgacctgatagtcggcaagaaacttgcctacatccttatcatcatcggaggtggaatgaatattgaaatatttagaacggtcgagttctgaaacaccgctcaaaaagcgacgggtattatagtcgacaaccacctcgttcctttcctgacaataaataccgggaggaacacctagggtaaatgccgataacagaaaaatatatttatagctcataatttctttccttttagacacagaaacttgtcagtcctgatgtggatacattattttctcactttcttatcgtagcgttcagtctgaagaatcatagtagccacacggcctccattatccgggaatgttactgacaccgaattttttccttttctgattaaccggtagtcgaaaggtatttctatcataccgaagaaatcgtctctgccggtctggtcatatcctctccaattgtcgggcatgtcgactttcttgccattaaccattatttcaggtttcttcgacatctcgtgcttcctgcctattgacatacgcagaacagctcttcctgtacccggtttcagaccatcgaaatcaaacacaattggttttccggcttccaccggctgaagataagtgttgctataatatttagtacgaactattctgtttgaatactttttacggatgatgtcggcacacaatattattgtctcatcttttataatgtcaatactttgaggcatcgagttcagcgtcttttcatcataaactatacctttatcgaaaatcatcttcaaagagcgcacagaaacattatctacacccttccaattcagtacgtttttcaagtttaccttatgtgtatagtcatcaagattgtcgacagctatgtaaagcctgtcatcgtccttaaaagctgccacctgtatgtccggattgtcggaaacaatatctacacgttcgcctttcacatccttccataacttgaagaaatatttcttgtcgttcagtttccatgcggtattcttcaagtcgtgaggattgttggcaacaaataaagcagctccgtatggttcgaaattatattgtttcgttatatgccattcggccttgtcagaaacaaagggtattgagatgagcatcttgtcttcgcgttcaagaagattgaacagtatatgattgaacgaagcgacagttcgtacagaggctatcggattatatcctttggaagtgttgtctattcctccatattcggttacggcaagaggaagaactttccccaagcggatgaacgagtagttttccataaggtcgagaatagcttcggaattacttcccgaacggcgggaactcttgcctactatgtttattccatcgtaaagatgtaccgacaagccatccatgtactccccggcacggtcaatgaacatcttcatagtattattccaatggtcgaaatcgcgcaactccatagccggatatgccgcggcatatccaatgattttcatttttttcagacttggctcagcgtgaatatgctttcctgtctgtgcataaaaatctgccatgagcatcctcatttcctgaccatgcatattgaaacatttgtcgcgtgcatggacaaagggttcgttaatgggttcgaaaaattcaggaactgcccctttcacatgcttggaatagtattcggcagcccatgcacccgccttcactgggtctatgccccattgtatggtacgcgcgttggcatgttccgtagcgacatatcgttttgtttccttcaaatcagtgtagttcaaaggcttttctgaaaaaggatattcgccaaccttttttgtcttgccatatgaataagagaacggtccccagaaagagcggccgattcctacaccgtaatctgcaagaaatttcctgacatctggatcagaatctttagatgtgtgtatattgaaatatttacctctgtcaagtgccgatacatcattcaggtatctctgagtggcataatccactgtgacagtagtgttataagtcttattctcggaagatgataaaggaaaaaccgagaaagacaaacacacagacaaagctgtaagaattatgttattcattgtattatcaaaatttaaaaggcagagaacactccgatagttcaattaaagtattccctgccattaagattatcacttctgtttaaacactaatatcagaaatcggccggtttgagtacatcgttcagcaccacttcatattcaacttctgttccgtcgttttcagtaacagtaagatggccgtaaccgccacttgagttattttctttcttaccttcaaacatgaacattctcttcttcgtcacttcctgttcttctttatcgcctgtttcaggattgataacttcttccttttcagtatagacttcattgaaagagaatgagagatgtttttctgtatccgaattgattttcagccactcgggcaattccgaaggagcctcagacgactcggcaaagaactcgatcttattcattctcaaagtctgatagtcattcttccaggcaatgaggtcgaacaattcgcgataaacagaaaacttggaaacctcgcctgtctttcctgtttccacattcttgagataggtaagttcatacacgggagtagaatcaagttcgacctcagcccatttgtcattatcacatgctccgaacaaaaccaaagcacataagaatgtaattgtcttataaattttatctattagcttcattgttactataatttattatggtcttacttcaatatatccgaaaaatatatcgtcaaaataaatattatccttaaaggcattaaagcgcatactgagcaatatattgtccatttcagcctttgaagtcacagtggttgtggccgacatccatttgctgtcggagccattcacaatgccgcaccatggtctatcgctctgccatgtcatatcttcagctccttctttacctgccggaacgaaatacggactcatacccttaccctgtttataccccggtgtataatatttgtagctgaaagtatatgtacctttaccaccagtaaatgtcttggagagtaatgccctgcatcggtcaaatgcttcgacaaacatacattttgcactgttgtttattccatccttcagaggattgtccacaacctgtgaaggaactacaggatgtgttttggtatcggcatcaataactttccagtcggcatatgtgtcagaattttcaaaatcttcatccaggaacgcaccaaaagtagtcgctacgtttggagctgtagcctttatctcaaggttctgatatccaaccaacgcttcagttaaagttcctgtaagggtcagttcatctgtgttatagattttctcaaccaaagtaagaatcagttcatatctgctttgcttgtttacttctgctgctgtgatgtttacgctacccctgacagctgacggtctgttatacgagttggagtaagtaagctttagagatgatggatttatctctttatatccaaactcagaattatccaaatctatagcaatgtgtgtttggtcaatctgacggatgttataagtaataggatcatcactaggtactactgtaatagccaaaggcacaacaagagtttttggcgaagcttttggagtgtacttacctttaccctcactggcagaagttctttctattgtcatggaaagaagcaatggcttatcgctgaatttctttgcagtgaactggtatggagtgtcaaaactggttaattcgtcatttacgccagtatccgcacatttgaaagtccatttgttaggcaatccgtatgaatcgtccttaatatagacagacttaccatattcaagttcgtatttttcgtattcgggagcttcctcagttccaccgactattccggtctttatttcctgtgtacactccggatcactgtatacctttacggccggtacgaggttaggatcatacacgcggatatggaaagttgtatccatcacatatacatcaccctcctgcttagcataacaatattttttgatatatcctccggtattgtcgtcatacaccgaatatggatatacaacctgtctgcggaaagtattgcacaaacgtaccgtatggtcaccgggtttagtgaaatacacatgtatggttttcaaatcgttggtatgagggatggattcatcaatcaggtttgtatagtctgtctgtccccactccatcttaccattaaggaactttgtaccatcatccgacacaacccactgatgcgacaacatgccttgggataagtccattatacttatatagttattaagattcagctgaataggtgaaacgttttcctgatctgtactcacatgccaggtacattcagccacgttattcaacggttcaaactcatcatccttacaagatgtcagaaccgagattaatgaaagagcaatatataaaaatctatttttcatcgtatttatttattaatatcaggatttgatgtaatttctatatttggaataggccagtatgccacttgcggaccgtagttcaatgatgcttggaaataatccacaaaagcgtttcctctcttttctggcggcagctcataaaatctgtactgctttccaaagttgaatgctgataccaaagcattagggtcatcaggattaggcttaagatatttggtctgaatcatacagtacttatattcgtcggatgccaactgatcaaacctttccttagttatattccagcgtctcaaatcaatgacacgtatggcatgtccttccatacacagttcaagaggacgttccacatacatcagatgattcattacatcacttgcagcatattccttctcatcgtatgtatatctcttgaattctccctgttccgattttccgataagcacaactccagcacggtgacgtaccttgttgatggcattgatagctgactgaacatttccatcgcttgcaccgcctttaatcagacattctgcatacatcagatatatatctgccaaacggataagacgatagtttattcctgaggccatagcaggcttaaattcagtttcactcttacgtgtatcccaatttgataattttctgaaatacgctgaagagccacggttgaattttgatacctgttgtgggagagactgataatatatcagactttcatcgccgtttattgcaagagaggcagatgcacgcatggaatagcttctgaggcgatatgcctgaccgtcttcccatttaaattccggaactatgtcatcgtagccggtaatcttattgtataaaactttattatctccgacagttgagacgagtcgttcgcgtactccaacatattttcctgctgttgcatcccacgtataaacgtacgttctgttatatacgacaccctgacggtccacctgcgagctgaaagttgttcccaactggtcgtatataatatccctatgttcaggatcaccataattgtcggactgcatttttatccagttacgttcatcaagtctgtccaccggctctgtttcgaatgcttcaacaagccaaaaagcaggaacagtgttaagccaggcatcgcccaagccatttacattcattccccatatattatataaggtagactccgaccatgtaccgaattctgtattatactgtgtagaataggaaacctcgagaatagattccgaattgaattcattggcagcagtaaaattatcgactatgtcatcaaccaaagcaaaacctccattatcaataatatccttaaaatattcggcagctttattatactctttatcataaaggtagcttttgcctaatattgcctttacagcccaagaggtgatacgtcccaaatcggttttctcccatttgtcattcaagccaaggtcaagagctttctgtaaatcttctctgtaatatttcttgatttcatcacttggtgtaacctttttatagtaatcttcttctacctctgcaatttcattaatataaggaacattaccattattgaatgaattattgagataaaaataaaacaagccacgcaaagaatatgcctgtgcctcaatctgagcaagcttggttatttgaggttcatctgtaacatttggacggattttctctatactggccagaacctgattcgcacggaacacaccagtatacagtgcagaccatttaccacggactgttccgtatgaatcattaaaggtttgcttataggcttcgttatcaaactgctttctgtccttattaccttcaactgctatatcacttctacggttctcatcgagcggatgataaatattggtatttttcaaagcattatatacagcagccagtcctttctcgcagtcgcctattgttttataaaaattctgtgttgtcagctgatgtatgttttcctgcgtaaggaaatcgtcgcatgaaaccaatgtcatgcccgacatcaacagactgaatactattgttttatatctgaagttcatatatttatattattaaaagttagaaattaatctggaatccgccacgcatctggatacttataggatatgttccatagtccaaaccacgacgtgacaatccattactaccgacctcagggtcgtatccgtcgtattttgtcagtgtaagaagattatcggctgcaacgtataaacggaacttgcccaatccaagctttgatacccaactcttggggaatgaatatcctaacataatatttttaagtctgacaaatgaaccgtcctcaatccacatatcagtatgagcacgatagttgttatgcccctctgtacgataagaaggaatggtagaggtatagttggtaggggtccacatgtatatcagttccttattggttcttctttgatatgtatatatcttcgtaccgtttattatttcatttccaactgaagcataccagttcatagagaaatcgaagcctctatagtcggccgagaagttcaaaccaagttcataatccggcataccactaccggcataaacacggtcgtcatcattaagaacaccatcattattggtatcgatatacataaggtcacccatacgggcacttgactgtaatttctgatattctgcaagcttctgttcagtattgattacccctgcggttggcataacaaagaaagcaccggcttcatatcctttcttgattgcagttacataatcacttcctgatgaaacaggtttaccgtcggggaagaaatataactcattttttcctgccatagacacaatctcattcacgtttttggtaaatgtaccagtcaagctgtaattaacaccacgtattttgttgcggtgagtaagtgaaaactcaacaccacggttttccatatctccggcattcaatgtaacagttgaactctggccccctccatttgacggtggcacgaccatcgggaaaagcatattcttcttgttactcttgtacaaatcaagacctaagataagcttgttattatataaagccatgtcgataccggcattaagctgctgggttgtttcccatttcacattcggattggcaaatcccaattgggtaaaaccatttgcaagaatttcggaagttccggtaccaaaagtatagtcgtagtttttgtatatagctggtgcgtatgaataatcagggaagttctgattaccggtagtaccatagctgaatcttaattttaacgaatttactagccacctgaatctgtcgaagaatgattcctcagaaatattccatcctacagacaatgacgggaacaatccccaacgattttcttcggagaacttagatgaaccgtcgcgcctgatactggcacttgccatgtatttgtctgcatagctatattgtagacgacccaacataccaaccattgtactgatacggtcctgtccccactggccactgcctgtacccacagtcatatcggatgttcccgcatttaggttcggaatctcgttagtaaccaaatccattatactggcatagaacatctcgtatgtatatttctccatactgaaaactccggtaaatttaatatcatgcttttttatcttcttattataatttaccattgtttcccaagtgagactggtattctttgaatgagtatcttttaattgcgaacggtaattagagctggttaccttttcgcctttctgattatatacctcaaactcaggtcgaattgagacagctttctgattgttatatccaaagcccaaacgtgtggaaacattcagtccgggaattacattataagcaagataaaaattaccgttaaatgattctgtgtccttatgattttcctctttcaatcttcccaatgtataacttacgccctgtaaatctgcaggatcgccagctgcatttactatacttgcctgtggataaatctgagaacgagtaggcgagtagtcataacattcgttcaataacccccaagccggagataactggttttctatcttcatagcgatgttagtgttgatagtccattttccgcgctgaaaatgtgtattcgaacgaatattatatcttttgtaatcggaatttatcaacacacctttctggtcgaaatagttcgcggtaaggttatatgtcaaatctttcttgccgccattcgcagtaacagaataattctgtattggtgcgttattattgactacatattcatataaactagagttgttgaagaaattcacaggatatgttttcagattagaccaggccaggtcgtctgtattctggtttccttccatcattctgttagacatcacttttacaaatatactctcgttggcatcaagcaaatgaatattcgaagtaatgtgctgtacaccataatatccgtcgacagctatcttcatttctccttccttacccttctttgtggtaataaggataacaccggaagcaccgcgagtaccataaatggcagccgaagcagcatccttaagaatatctatacttgctatttcgctactactcaatcccgggtcgccctcgaacgggacaccatcgacaacatataaaggagaactgtcgcctgagatagaacttaaaccacgaatctggatgttggatttggctccaggctcaccagaacttgcctgaacgttaactccggcaaccataccctgaagagctgtacccaagtcggaagtactgatcttagtaatctcatctgagtttacacgtgccactgcacctgtcacctcttttttacgcattgagccataacctacaacaaccacttcatccaacacttttgtgtcttcctgaagcttgatattataaatctgaccattcttgattgcagcttttacagttttatacccaacaaaactgaacactaagttacctttagtcggtaccccttgaagaacgaaattaccatccatatcagtaatagttccaagagaagtaccttcaacttgaacagctgcgcctataacttcaaggttattggcagcatcaatcacctttcctttaactgttatcttctgtgaatacatagacaatgtatagaagataagcatcacgaacaacatgtacctgccatggtaccattttttctgatttctcatttgtaaaaattttaatttagcaataggttatgaaattccttttataactgacgctaaattatttatttataatggtacaaaaggggagaattatatatttaaaaagggggtaaaattttacccccacttatattaagaatccaaatcggtctgtatactctgttctttgtactgttgcggcaatacaccgaattctttcttgaaacattctctgaaatacttcaaatcattgaaccctacatcgtatgtcacctctgatacagaataccgtcctgtcttcaacagttctgccgctctcttcattcttattgaacgtacaaaagcattggctgttactcccataagtgctttcagcttcttgttcagaaccaaggccgtcacgccaagacctttacatatatcctctatctggaacgaagagtctgtaatgttgtcctctattatctttacaagtttctcaaggaacttatcgtcggtagatgtagtgcttacctcggaaatctttattgccggaactttcttgtgttgaagaatccgcttcctgttggttataatggaattaagcagctctttcattatcttgttgtcgaaaggtttagggcaataagcatctgcatggaatttatatccgatgaaataatcctgcaatgtagtcttggctgaaagcaatactacaggaatatgagatgtccttacatcctgcttgattctctcacacagttccagaccattcatgcccggcatcattatatcggataaaacaagatccggttgcaaatctggaatcatgttccatgccatctccccatcatgggctatcattatcttatacttatccgacaacagtaatgacaacatattacatatatccttattgtcatcaacaatcaatatagccggagattctccgtccacttctatgtctatcatctcttcatgctcgcacgattcacttcttaacacatcagcaaacttttcatcctccccactgttggcagagatattctccgtaaccatgtccccctcagttatcataggaattacaacatggaaaacagtgcctttaccttcctctgatacaaacgtaatatttccattatgtatctctacaagccgcttggtcagaaacagacctataccggtacctccttcagcagagtttttattctgactgtagaaacgctcgaagaggtgtgttttcaggttgtcggatattccgtttcccgagtctgccacagagatgtttattttgttatcctgttcattgacagtaaacgatacaaatcctccggcaggagtatgcttaatggcattcgatacgagattatagattatctgttccataagatgagggtcgaacagaaagcttatatcactgcgtgagacagaatattccagccctacacctttctgttttgcccaatacgtgaactgctgaaatacttcttttgagaaagacgagaagttgccatatttgagattcagactaagcattcctttctcgctctttgagaagttcatcagctggttgacaagacttaacaggaacttactgttatgctccattgtctgcagcatgccggcaagatacttgtcggacgaatacttgcccgattcaataatcatactaagtggagaatgaataagtgtgagtggtgtcctcaattcatgcgatatgttggtaaaaaatgtagtctccttttcaagaagttcttcagtcttgcgtttttccatgtttgctatatatagagcatttctgcgctgcacccgtgaggtataatacaccttgaaccggtataaagacaagacaagcaatataaaatagagtgtataggcataccatgtacgccagaaaggagggttaataatgacaggtatggaaagttcattcaaactgtagactccatcgctattcctgaccctcagtctgaacatatattcgcctgaaggaagctttgtgtagaaagcctcacgatgaaaagcggaggtggaaatccatgaatcatctacgccttcgagcatatattcgtaaccaaccttataaggacttctgtaatccagggagctgaactggaatgagaaagtgtttaaattataaggcaattcaatgtgctctgtaaaacttacacttttgtcgaaataagctgaatatgtggaatctgcctcaacgctgtgattgaagattttaaaatcaacgagtgtaggactaccgttgaaatctatcacatcaaagtcattaggtctaaagacgttaattccgtttacgccaccgaatatcattgttccatccgtcattactccagcagaaagttccataaattcataatcctgaagaccatcgaaaatatcataagatcttattctctgtgtgttgatattcaacgaattaattcctttattggtagaaatccataatgttccatccgtgccattaacaattgattttattgtattgctgctcaacccgtctgcagagctaaaattttcaacgcaggcattatggttttcatccaaatccacgattttccttaacccacgtccaagtgttccataccagatattatgattcaagtcttcacatacaggcactatatagtcgagttcatcaagtcccttgactgagttcaaaacaggattatctatatacaaatctgcagattccaatactttaagaccgaagctggaagctacccatatattacccttatgatctttaatgatgtttcttactatcttaagttctttattgtcagatgttttgatttccttcatcacacctgtggacaaatcatatctgaaaagacctttattatatgtgccaatccacaaatattttccatcggcaagcattgcgcgcacatttctcaaacctgagatctttttataatcattatcagaagtgaaactgtaaataccatcgtacatcagagacacatacatgcagtcggtgtagtttgagtatgctgttgagtatactatcctgtttgccgtgaaaggaataagtctggcattaccggtaatggaattaaaatgatatagccctgagccttctgtgcctaaatatatatcagatttggcaaatgtataaacggacgatatatgatcatttcctattcctctgaataaatctataggtttattattttcgcgtatactcataaagccactcttgaaaaatcctatccaaagaatatcgtttttatcaagaactacagtttgcggatagctgtaagaatatgtagcaataacctgtggttttgactcgatggcatgcaatacatcaaaagtcaacacattcacagtgcttgtagtggcataaaataatcttttgtttttatataccatttttcgtatatcacagttttccaacagggtacttaccttgcaggtatgcttgtcgtataaacataattgatgattttccagatttgagtacaatatttgagaagatgagatgactatggctgaagctatagggcatcccaatagtttgttaagcagtaattcatctccatcgacgttacattcgtacaggccgtcttcggaggagagcattatcgtattatctatttctatgatgtcggaaatgtatggtaattttaatgttgatcttaagacagtatttattttgccattttgaaaatcataatttacaaggtatatactttcatcagaggaatgaaaccagactctgtctttagagtcgacaagaatcttatcgcaagtgaaatttttatcaataccgctgtgaccaagatttaatgaaacgaattcgttctttacagaattgaacaggaacactcctctatcggctgtacctatccacagatttccatgtgaatcttcgtcaatacatactatcagattactgttaagaccgtttgactgatatccgtaaaccttaaattcatatccgtcaaacctgttcagtccgtcgttcgtggccaaccatataaagccttttgagtcttgataaatacattgcacatcattttgggaaagtccatcaagagtagtgtactttcttgtgacaaactcattggatgcaaaggatttgcaaactataatcagaactgatattaaacttaagattaatctaaacatataactattattctttatatttcatcaagattacaaagttattgattttatctaaaacatcaagtatttacagtagttaatagataattatagatattttccactttagaatgcgtatcaaaatcaatcaagaaaaaaataaatctttaacttcatttcatagtataaaacaaaaaaagcatcgtaccattacactcaataatagatacgatgcccgaaagaaattacagtaacagactgtattgggattgttcttaaaaagacttatctgtatgactttatatatatgtcgagtatttcggtatccgacagttcatgagggtccagactgaacaatgcacccatggcagttcgcgcattatcaatcatcttagggaaatcttcctttactattccccagtcgctaagcttcaaatcgcggacattgcattccttctgcattctcaccaaagcatctataaaatgttcgggattaaggttcttgcatccggtcataacatctgccatgcgcatatatctctttgtcctgtcataaataaaagtagagaaataggcctcgcttatagctatcaggccaacaccatgaggaagagcgggatagtatgcgctgagagcgtgctcgagagaatgttcggaagtacaactggatgtggattcaaccattcccgccagcgtacttgcccaagccacctttgccctcgctttcaggttatttccatccttcaccgcaacaggtaaatatttatacagcagtctgatggcctcaagagcgaaaatatcacttattggggttgcacaattggcaatatagccttcggctgcatgaaagaatgcgtcgaatccctgataggcagtcagatgtggcggaactgaaaccatcagttccgggtcgattatcgacagacatgggaaagttaaagtggagccgatacctatcttttcgtttgtttccagattggttatgacagtccatgggtcagcctcggttccggttccggctgttgtaggaatggctatgatgggcaatgctttgctgtaaggaagccccttgccggtacctccttcaacatattcccaataatcgccatcattacatgccatgattgcaatggatttggccgtatctatcgaacttccgcctcccaaacctataatcatatcgcaattttcctcacgacagattgccgtaccttccattacatggtcttttattgggttaggcaatatcttgtcgtacaccacggcatcaacattattttctttcagcagaccaatcaccttatccagataaccatatttacgcattgatgttccggatgaaatgactatcaaagcctttttgccgggcaatgtctctgttgaaagacgtttaagttcgccacatccgaagagaatcttcgtcggaatattataaccaaaaacaaaattattgtccataaatattatcagtcagtcaacttactatcttaaagcctcatcaatcactttcttgagttcaggataagcctcatctgtatcgcccacctgttttctcaactcacgcagtttctttttcatgtccttaagaactttggcgtatttaggattatcagccaggtttaccatttcgtaagggtcgttcttcacatcgtagagttcgaaagaaaccggagtaggaacaatcttgtggctgttcttcaaccatgacattgatttctgtccgtaacgtttgtcgtcgtaatgacggccatagaaaagtatcagcttatagttttccgtgcggatacctatgtgtgccggaacgtcgtgatgaatcatgtgcatccagtatctgtagtaaacagcatccttccagttttctggctttttgccttcgaacacagaggcaaagctctttccatccatgtatgaaggttctttgccaccgaccatctctataagagttggagcaaaatcaatgttgttaatcatcaggtccgacttggctcccttgtaaggacatctcgggtcgcggactatgaaaggcattctttgagattcttcatacatccatctcttatcctgcagatcgtgttcgccaagcatcataccctggtcgcctgtatatacgataatggtattttcccagagtccttccttcttgagatagtcgaaaagacgtttcaggttgtcatccacaccctttacgcaacgcagatacgatttcaggtaatgctggtaggcaaggtatgtattctccatttcatcacctgtattgcacttatattccattacataattgcggatttcatgacggcttgagacagaagttccgatgaagtgacgaagtgaatcgttcttgcctcttgtgccttcggagccccatttgtctgtatcgaacaatgacaatggaacaggcacttccacatcgtcaagataatattcatagcgcggtgcgtactcgaacatatcgtgcggtgccttgtaatgatgcatcatgaagaaaggtttggacttgtcgcgtctgttcttcaaccagtcaatagcaaggttggtcacgatatccgaggagtaacccattttctttatctggttattaggccatttcttgtcagttacgtcacttgtaaggaaaatagggtcgaagtattcgccctgtccgccatgaccgttgaatacagaataatagtcgaagtgcgacggttcgcatcccaaatgccatttaccgatcatggcagtctgatatcccatattatggaactcatcaaccagatattcctggtccggctgaagcacttcatccaaagtgagcaccttgttacgatgggaatactgtccggtcatgatacatgcacggcttggggtactgatggagtttgtacagaaacagttctcgaagagcataccgtcccttgccagttcatcaattgtaggagtagggttcagtactgcaagacgacttccgtatgcgccgatagcctgcgaagtatggtcgtccgacatgatgtagatgacattcatctgtttctgctgtgctgcgacaccaacacatacagacaggaatggcataacagccattcccttcattatattattttttaaattcgttttcataagtcagattatcattgaaatagaacttgcaagacatatcatcgaatgattttacgtccttattctgcattttaacccattgttctgatttagccttgacagcgacctgagttgaaacctcattaccgtcgactacacttttaagagtgacatttgcatcctctgcattatggtttgccacacgtacagtgataaggcatccgttatcaaccttatcgtatagcggtttggaaaccaccgcccctttaagcttaatcttgaacacatgtgcatattcagtaggtttgttcttagggaagtttactacaagaccctcgtcagtcatcttatagtcaatcttctctgagcttccaagcatttcaaccgactcaatttccacgttctggcaatacttaggagcaaatgacttgatagtaacactaccatctgtccaagccagagacacggcatagaggttattgtcgcgtgtagtaaagcgaatgtcgtccgctgtatattcagtttttgtattgtctgtcatataacctgcggtgcctgcgttatgtccttcgaaagcaatcacccatggtcgtgagccataaatagcctcaccgttagtcttcaaccatttacctatctcggcaagtacgttcttctgttcgtctgtaatagtaccgtcggccttaggacctatattcagcaataagttaccgttcttgctgacaatatcaacaaagtcgtcgatgatatggtcaggactcttgttttcctcgcccacacaatagctccacgatttcttgcctacagaagtatcagtctgccatggatattcacggattctgtcgctcttacctctttctatatcgaacacctggatattgtcgccatatccgaatttagtgttaaccacaacttctttattccaatcaagagccgaattgtaataataagccatgaatttatagaaagtaggctggaacggatattttcccacagtccagtcgaaccatatcaattcaggctgatatttgtcgataagctcgtatgtatgcataaggaactgacggcgtgaacgttcgttcgagccttcatacttaccacaataaggtgtcataccctgaccttcgggctcatgcagtctttcgccatacagagtgattgtagtgtcctgaacatcagaaggagtttccattccatattcatagaaccatgcattctcgcatctgtgagaagaaagtccgaaacgcagaccggctttcttggtagcttccttcaattcgccgattatatcccttttcggtcccatatccacagcattccacttattgaaagtactgctgtacatggcaaatccgtcgtgatgctcggccaccggaacaatgtattgtgctccagatgattttaccactgccagccactcgtcggcattgaaattttcggctttgaacatagggatgaaatccttatatccgaatttggtcaaaggaccgtaagtctgtacgtgatacttattaataggatgaccttccttgtacatccagcgggaataccattcactgccgtatgcaggaacggaataaactccccagtggataaagataccgaacttggcatccttaaaccattcaggaatagtgtaattttgagcaatcgatgccgaatcggccttgaacacatcagtaccttttaaagatacagtagaatctacattaggagcgtatgtagaattgcacgacgccaacaggcttaatgccgcaactcctaaaaccgttttcatggatttcttattcataataatcttattacattaaataatgacattaattttttctgtaagcaaagatacacttgagttccatttacaataaataatttaattactatagtaaggggtaaaatatttaccacctattattgaacaaatttaccccctctcatatatgataataaactgccaatatcgaattacaagtaaatatatatttcaacaaaaaaggtttagcctattattacacaacaatttcaccctaagaataaaatatatatagagtaaatttgccaatataacaaactgtaaaaacaaatttatgaaaaactatttgatttacttactcgcagcagtatcgtgtacaactgtagcagacctaaatgctcaagtcagtacaaaaacaggtaatgaaaccacagaacttacaattccgaaaaagttctacaaggacagcattgatttcagcaatgctccgaaaagacttaacaacaagtaccctctttccgaccagaagaacgaaggcggatgggttctaaacaaaaaggcctctgacgagttcaaaggaaagaagctgaatgaggaaagatggttcccgaacaaccctaaatggaaaggaagacaacctactttctttgcaaaggagaatactacatttgaagacggctgttgcgtgatgagaacttacaagccagcaggatcactgcccgaaggatatactcacactgccggtttcctggtaagcaaagaacttttcctttacggatatttcgaagcaagactgagaccaaacgactcgccatgggttttcggtttctggatgtcgaacaatgaaagaaactggtggactgaaatagacatttgcgagaactgccccggcaatcctgccaacagacatgacctgaactcgaacgtgcatgtatttaaagctccagcagataagggtgatataaagaaacatatcaacttccctgccaaatactatataccattcgaattgcagaaagactttcacgtatggggacttgactggagcaaggaatatatccgactatatatagacggagtactgtacagagaaatagagaacaagtactggcaccagccattacgcatcaatcttaacaacgaatcgaacaaatggttcggagccttgccggacgacaacaatatggattctgaatatctgatagattatgtaagggtgtggtacaagaaataagaaataacataatctgaaattataaaaggcagtcttcattatcagtatgctgatgataaagtctgcctttttaacaagaagataaagattttaatctgccctatcactcatttacttcatccggatactctgtaagcgagtttcccgaattgcttatttcaatagagccgataggaagataattgaacttcttgctccatgcagagataccataatctcttctaagaataggcatcatgacctcctcggcacgtcctgagcggacgaggtcaaaccatctgtcaccctcgcatgccagttcacaacgacgctcataccatagaacatcaattacgcttttaaatctgtcaggatacatctgcattagcttgtcaacatcaatataacttccgtcgtctgcatgaacatgcttctttctgagttcatttatgtaatacttcgcttttgcttcatcaggattagtacctctgagatatgcttcggcaagcatcagatacacttcaccatatctgatgacccttacgtttccaggcttgtttagattggggtttcctatcatatcgtaatttttgaaaggaggatatttcttctgggcatatccctggaaatcaggcccgtaagagcctgtctcccaaacaactttttttgattcatcctgaatattggcattaggtttggttacaagttcatcgtaagtaaatatcgccgcatcacgacgcacatggtcatccggaaggaaataatcatacaattccttagtaggcagacaaaagccatatccattatcataatcaggactatttttcaactgtctcggtccgcagaaagtcacccacatagcaccttcgcctgcatcaatattaccccagtttgtattaccagatttggtagaggtctgtatttcaaatatagattcctcgttattctcctgatgagccgcaaacaatttagaataatcatccgtcagagtataattaccacttgaaattacatcctccaataaaggtttcgctttgtcaaaaatcttagcatcatcgttgctccagtcagcccaataaagatagaccttggccaacagggcttgagccgcagtcttggtaatacgtcctttcattgtgtccgggaaattatcctttagagaagggatagcttcaagaagatctttctctattgctttatttacattttcgcgagtatctctcgtaaacttgaatccttcaggataaagagtctcaagactgataaagcatggaccataatatctcaacaattcaaaatgataccaagcacgtaagaacttagcttcagctttataaactttagcttccggactgtcatactctgaatttattacaagattacatctatatataccacggtaacgagttttccacaaattatcggaaatagaattgacactcgtatttgaataatcctctatagcctgcatgtaaggctgatcctgatcagagccaccaccagtacgagcattatccgaacggatttcacccataggtacaatggaagcaagtgcattacccgaagcaccacctatgtgagctaacggatcataacaagcagtaagcgctttgaacatctgttcatcggtcctataaaaagaactttctgtttcggacattataggagctgtatccaggaaactgtcgctgcaagatgatgatgcaatagcagcaaacatgaggacaagaatattattatgtattttcgacttcataattttcaattttagaaattaagacttaaaccaaatctgaatgtacgggcctgagggtaagtaccatagtcaatacctgtgctaagaatattgccacctgccatatttcctacttcaggatccataaacggatagctggtgaaagtggcaagattatcaattgctgcataaattcttgctttattcagcatcaacttgtttattaatttagttgggaatgaatagcctacctcaagtgaagaaatctttaaatgcgaaccatcataaagataaaaatcggatggtttgccaaagtttccattaggatctttggatgaaagacgaggcactccattatcatcaccttctttccgccatctgtcaagatagaatgatggaaggttgctgcgtccgtatgcttcctgtcggtaaatatcagagaagactttatatccagcttttcctgttaagaagattgtcatatcaatacctctccagtcggcacctaaattcaaaccgaatgtccattttggccaaggattgccacaatcggttctatcttcatctgtaatctgcccatcgttatttgtatcttgccatataaagtcacccggaacggcatcaggttgtatcactttaccgtcttttgatttatagttctgtatctgctcttcattttggaatattcctaagttcttataaaggcggaaataacccatagcatgaccttcctccatacgcgttacattaacagatgttctccagctaccaccatcagtatatccatttacatttcctatctttacaacctcatttttaagatatgaggcatttgcggaaatagagaagttgatttcgttccaatttttattaaatgtcatctgcatttccacaccctggtttgttatattaccaaggtttctaaaagctgcattattacctctaatggcttcaactgttggctggaacaacaaatccttagtactttttttaaaccagtcgaaacttgctctaatcataccattatagaatgtcatatcggcaccaacattaaattgttcagaagtttcccatttcacgtctggattaacaaggttattaggagcagatcccacagtgatggcattaccaaacgtgtaattataattattgccaataatagaagtataggagaatggagaaattcgctcatttccgttctgtccccaagagaatctaagtttgaagacatcaaagttcttaattttccagaatttctcatttgaaacattccaacctaatgaaacgcccgggaaagtagcatatctgttattgggaccgaaatttgaagacccatcgcgtctgaccacaacttccgccatatatttttcagcataattatagcttagacgagcaaaatatgagaacatactatgtctaggattagcaccgccactattagctgatgtcataacatcaccagcattaagataccagtaattctcattggtcattgcttcatttggatatttatttcgtgttccggccataaactcataaacatctcttgatgcagaagtacctaacaggacagatgtagaatgttcaccaaaagattttttatatcgcaatgtattctcccactgccaactactattagcatttgtactttgttctaccctagaattatcttctttacattctgcagaatgaaaaaactttggtgcaaacattcttccacggaaattccgatgattaataccaaaatctgtgcggaaaacaaggtctttaataaaagtgatctcagcataaacattaccaaaaaattgctgggtaatatttttattcttaggtgcctcatccataaatgcaatagggttccacatacggctataaggtacaggagagactccatatccgaaagtatcgttgctattctcatcataaaccggagtagtaggatcaatattataggcgtatgatatcggattataaccattgataccggttgccactccactattctctatatatgcatagttgacgtttgcacctacacttaagaaatcatttatagaataggaactgttcagccttgtgctgaatcgtttgtaaaatgacgcatcttcaccgataataccattctggtctagataattcaatgaaagcaagcttgaacccttatcactgccaaagttagcagtaatgttatgctcagtaacaggagctgtattcaatatttcattaaaccagtctgtattataacctgttggagcagtaggtacaccaccggcaagcggcatatcatcattgtcggcaaactctttcatcagcataatgtactgttcatcattcagcatggttggtttctttgctactgtagagaaaccatagtaaccatcataagcaagcgatgtctttcctttctttcctttctttgtggttataaggactacaccattagcggctctggcaccataaatagcagctgaagttgcatccttcaagacttccatgctttcaatgtcgttgggatttacactgttcatgtcgtccataggcagtccgtcaattacaaaaagaggattagagtttccatttgtaccaacaccacgaattaccagcttcggtgctgttcctggctgaccggaatttgtcacaacgttcacaccactaaccctaccgctcaatgcattcacggcatttgctggtttagattgcaataaatcatcggaatcgatgctactgatagcacctgttacaacactttttttcttaacctcatatcctattgctacaacttcctcgagtgcaatggcagatgtttttaattgaacgtctatcttagactgacctttatacactatattctgtgtatcatatcctacgaagctataaatcaatgtcgattccattggtacattttccaagatataatttccgtccaaatcagaaataataccgtttgtggtacctttaactaaaatacttgcacctatcacaggtaaaccatcggagtctgttatacaaccggtaactttcccgttctgtgcatttaatggtaaactgaacgttataagaatcagcatacacattaatgatagtgttctgttcataatctagagttttttgtaattagtgtttttcttaaaataaaaagttttgttctatcagttgcgcgctacttactgacacttgcaaatatatatactatgtaatataaccaaagggggaaaatttcatttaaataggggggggaaatagattaactaaatattttaaggaaaaatggctgttagaatccattcccagactccaacagccattttatcactaacaatcgcctgttaatcaatatatttttctgcccatttccttaagatttgcatccctgcccagtggaacaaaagtaaatccgtatgaatagcttcccttcagaagacgcttgtctattgaaggacgggctttcagactccagctatctgttccgcccactccagcctgaaccaggtcgatattaagagtattagaatacaagtccttttcaagttcatttatatgtttagccttatcaatcgcattctgcgacatctcccacactgaaacagataggggttcatcgccgacaatcatcacacctgccttatccgactgcaaggcaaaccatctcacgtcacaacggtttccgttttcctgcggcattacatagtcaaatcccagagcggacaccttgcagttatatatagacaccattgcagaggcttttctgtcggaatagttttcccatgggccacgtccataatatgtcacatccgacaaacgattggtacattcgcattgcaatcctacgcgcaacatttctgatatttcaggagacttcatcattgaataatgaacgcctattgttccgtctgcttttactttataattcaaggtaagtctcagtctttcatctatagcctttagcaccttaacctcaagattgccttccgatttgcgtacatctatagaaactgtctttagctttaatggagcatctttccagaatgcaaacagtctatcgaccttccatcctcgccagtcattgtctgttgacgctctccagaagtttggtttcagagcagatgtgatgatactttcattatctatcttatactgactgatataaccatcactgatattcagataaaagttctttcccttcacgctgatgtctttcttgttatctgaatcgatttccatatccaatgtagtatcaacgcattctactatctttggtaaagaaagatacttaaactgttcccaggcaacctcgtatccagctttggcatacagattgtcattcttgagcctggcactcaggaataaccaatattccgcaccgtcatcggccttgaaattctgaataggaagttttagtttacagctctcaccagctggtgttgtcggcacaataatctcaccttcctgcaatacactgtcttcgtccttcaattgccaaaaataacgatactcatctgttgaaaggaagaagtttctgttttttacagttatctctccactatagacattatcagttgtaaatgatacaggagcaaacacgtacttgcattcctcagtagcaggtttaatggagcggtcggcactgataacaccatttatacagaagttttggtcgttgtgctcccctttctcatagtcaccaccataattccatgatttcttattatatttccgttcattatccagcaatccctggtctatccagtcccaaatatatccgccggcaagcgcatcatgagaacgtattgcatcccagtattctttcagcccgccggtagagtttcccatagaatgtgcatattcacacattattatcggacggttcatgaccggattcttagtcattgctataagctcatcgaccataggatacatacggctaatgacatcgacgtataaaggatcatcgggattggcatacacacaaagctctttctttgccggtttgacatcttcgttcacattaaaatctatctcactagtaacgattgacgcttccttacgtccgataggtttgtataaaggattttccggctgtccttgcgccccctcgtaatgaacaggacgggttgggtcataatctttcagccatcctgacagagctgcatgattagggccgcatccagactcgttgcccaacgaccacataaacacagaaggatggttcctgtctctcacagccattcttaccactctctccatgaacgagttagcccactcaggcctattggacagataccccctttgatgatgagtttcaagattagcctcatccattacgtatataccatacttatcgcacagttcatagaaataagggtcgttaggatagtgcgatgtacggactgtattgaagttataacgcttcataagcagaacgtcttcgagcatctcatcacgtgtaacggtcttacctccggtctcgctatggtcatggcggtttacaccaatgagtttaataggagtgtcattcaccagaatctgattacctgttattttaatatccctgaaccctaccttattacttctcgcatccaccacgttgccctttttgtctgtgagctttataaccaaagtgtatagataagggtgttccgaattccatagttttggcttagaaacaattccctccatcattccgtaataaacattatcacgctgaggataaggttcgttcaccacataatcggcagtaacggtaatgtcttttccaaacaccggtttcccatcggcatcatataattgggctgacagattccatcccttcaaatcatccatattctgatttgttatttccggacggatctgtaaccgtgctatattcttccggaaatcgatgcgtgtccttactccataatcatatattgccacctgcggaatggacatgatatatacttcacgatggataccagccattcgccagtggtcggcatcttccatataacttccgtcggtccacttatacacttgcaccgccagtttattctcccccttcttaacgtattcggtaatatcaaattcagtaggcagacaactgtcttcggaatatcccaccttctgtccgtttatccatacattaaatcccgaatagacgcctccgaaatggagtataatcctgtcgctcttccacttgtcaggaacaacaaactccttgatataacaccccgtctgattattcctgtcaatatatggcggacgagcagggaaaggataaatagtatttgtatatataggatagccatatccctgcatctcccaacatgaaggaacaggaatagttttccatgatgatgaattgtactccactttataaaaaccggcgggagccaatgccatatcctcggaaaagttaaacttccattggccgttcaacgacatatactccgatttctctctgtctccatccaaagcccaatccactctccggaaagaataagtagtactgcgggaaggcaaacggttaattccgtttatggtctgatcctgccatacattctgattgtttctccactgattggcaccgttgtccgatgcagacagaaattgcatcatgaaaaataacacagaaaatgaaaaaatagattttaagttcaagttcataaattcgcattttaagtttctatgcaaatatataagtataacgaacaatgaatagggggtatttctatctatatagagtggtatttttacatatgagctaaaacttaaaaaaaactgtcagtattactatgctatgtagcactctatatgaaaatattatatattcccaagtcaaaagccttttcaaacaatttttatatattctcatcctatcccttccatcaaagataaattccaatcctgatttgccagccgcatttattccttttttcaggagaattttctttatggctatcgccatgaaaattcacctgaaaaagaatgcggcggcaaacggattagaattaaagaaaagattacagggattaactgcgaccgacgtgacgcatagccgtaattcaaaggcggctatccttatattccatatatgacctcacaaatactgtgaaaatccactttccccaataacaaaacatagcctgccatatcaacacccaaaataagacagggatttcaactccctccgatctgcatagtctggtggcttcgctatgcttttactcctacatccattttttttctttcttttttcctctgttcccgttctttcctatccttcgtgtgacatttgatgacacctgatgacatctaatgtcatctatttgtaaatcaattgtttactcaatttatcatcttacatttggactgtgaaacaaatcaagtagtcactcaaaacaaaagattatggcacaagaaaacagtcctgacaaggaaaaaaggcaaggccggacaaagaaacccgaaaagccttatgtggaacaaattgacgagcttctgctggtacataacaagaatgacccaaaggaaggtttgggagtaatcagcaagatggacgagaaaggcaattatcagacggttacaccggaagagaagaatgagaactcattcctgaaattcgacaagaattcgagtattctcgaaaacttcatcaagaatttctggagccagctgaaggagcctacgcatttcaggcttatccgtatgaccttcaatgattacaaacagaacaaacaggctctcaaggacctggccgaaggcaagaagacagacgcggtaaaggagtttctgaaacgctatgaaatcagaccgaaagtaaacaatcagaaaaacagtcaaacaaaagaggaggaaacaacaatggcaaagaagcaggaacagacaacgcaggctcagcctgaacaggtatcacaggtggaagctgccgcacaggggcgcgaacagcaggaaccgcaacgccagcagacacccacgtaccgctacaacgagaacatgattaattgggaggaactgggtaagttcggtatatccaaagaaatgctggagcagtccggacagcttgacagcatgttgaaaggatacaagaccaacagaaccatgccgctgacactcaacattcctggggtactgaccgcaaaacttgatgcacgcctttcgttcatatccaacggcgggcaggtcatgctgggcatccacggtatcagaaaggaacctgaactggaccgtccttatttcggacatatcttcacggaagaggacaagaaaaacctgcgtgaaagtggaaacatgggacgcgtggctgaccttaacctgcgtggcaacacgacagagccgtgtctgatttccatcgacaagaataccaacgaactggtagccgtacggcaggagcatgtctatatcccgaatgaaatcaaagggataaccttgactccggacgaaatccagaaactgaaaaacggagaacagatattcgtagagggaatgaagtccaatcaaggtaaagagtttaatgccaatctgcaatatagtgcggaaagaagaggcatcgaatttatcttcccgaaagaccaggctttcaaccagcagacgcttggcggtgtaccgctttcccccatgcagctcaaagcgttgaacgaaggacacaccatccttgtagaggatatgaaacgaaagaacggcgaactgttttcttcctttgttaccatggacaaggttacaggcgggctccaatatacgcgccacaatccggaaacgggagaaatctacataccaaaggaaatctgttcggtacagctcacaccggaggacaaggaagcgttacgcaaagggcagcccatctatcttgagaacatgatcaaccgtaaaggtgaggaattctcgtcattcgtcaagctggacctggcaagcggaagaccacagtattccagaactccggacggtttcaacgaacgacaggcaccagccatcccggctgaggtttacggacacctgctttcggcacaggaaagagctaatcttcaggacggaaaggctatcctcgtaacgggtatgaaaggtcccaacggcaaaccgttcgattcctatctgaaagtaaacgcaaacaccggacagctgcaatatttccaggaaaatccggatgtgcgccgcaatacttcacagcgtgcttcacagactgacaatacccagcagcaggaacagaagaagggagcaaaacaggctgtctgacctgaacgggattcaaatcattcaaatcatcaattactaaaaaaggaaagaacatgaacaagaccaatcatcatatctacaagactgaacaaatcgactgggagaaactggaatcggtaggtatcagcagatcgcaaattgaaaaggacggaaacatggacctgctccttcagggagaggaaaccaatgtcatgtccattaaaatcaagactcctgtattttcactgaccatggacgccacactcagtctgattgaagacgagaatggaaatccggtcatcagcgtaaacggtatcaacccttcaggtgaataaataagaaaccataatgtatcatctctctttccatacggacttaccgtatggaaagagataaaaacagaatttatcatgattgccatattaacagacaaaccaagtgtaggaaaagaaatcggaagaatcatcggtgcaaccaaagtaagaaacggatatgtggaaggaaacggctacatggttacatggactttcgggaacatgctgtcactggccatgccgaaggactacggaacccagaagctggaacggaatgactttcctttcatcccgtccgaattcgaactgatggtacggcatacacgcaccgagaacggatggataccggacattgatgccgtgctccagcttaaagtaatcgagagagtgtttcaggcatgcgataccatcattgcggctaccgatgccagccgtgacggggaaatgacattccgctatgtctatcaatacctgaactgtacactgccttgcttccgtctgtggatttcctctcttaccgacgagtctgtgcgtaaaggcatggaaaacctgaagccggacagttgctacgacagcctgttccttgctgccgacagccgcaacaaggcggactggattctcggaatcaacgccagctatgccatgtgcaaggcgacgggccttggcaacaattctctcggacgggtacagacaccggtactggctaccatcagcagacgctaccgtgaaagggagaaccatatttcatcggacagctggcccatctacatcagcctgcaaaaggacggcatccttttcaagatgcgccgcacacaggatcttcccgacaaagaatccgctacaatgtttttccaggactgcaagctggcacatcaggcacagattacaggtatcagccacagcgttaaggaaatacttccaccggacctgcttgacctgacacaacttcagaaggaagcgaacatccgctatggttttaccgcatcagaggtgtatgacatcgcccagtctctttatgaaaagaaactgatttcctatccgcggacttccagccgttatctgacggaggatgtgtttgactcgcttccaccaatcatggcgcgtctgctttcatgggagctgttccctgcagctaaaggaactggaggtattgacatatccaatttgtcccgccacgtaataagcgcagaaaaagccaatgtacatcatgccatcatcattacaggtatccgtcccggaaatctgtccgaaaaggaaatacaggtttacagacttgtagccggaaggatgcttgaaacattcatggctccatgccgcatagaaacgacaaatgttgaagcggtttgtgcggcacagcatttcaaggccgaacaaacaagaatcattgaagccggctggcatgatgtgtttatgcgttccgacatggttccaaaatcaggatattctgtcaatgaactccccgaagtggagaaaagtgatactctgaatgtatgcggatgcaacatggtacacaagaaacagctgccggtaaatccgttcacggatgcagaactggtggaatacatggaacagaacggactgggtacagtatcctcacgtaccaatatcatccgtacactggttaaccgtaagtatatccgttattcagggaaatatatcgttccgaccccgaaaggcatgttcacctacgaaaccatccgtggaaagaaaattgcggatacttcactcaccgcagactgggaaaaacagctggccggacttgaaagcggaatgataaccggacaggacttcctgaacaggatcaggactctcgccaaggaaatgactgatgacattttcaacacctattccacaaaagaagaataacatctatacctaatcaaccaagagaatgcaggccggaaggtctgcatttttttgtatccgtacagaaaagaatctgtttttccgcttttaagcggcaaaggtcttggattgcctgccttttgccgcaaggctgccctcatgggcttggctggacaggaaaaaatcatcctcgctgcgctccggtattttttcctgccaggccttgcgcaaaaaggcaatccaagaggccggaggcctataaaatcgggaaaacacatcccgatgggattattcattcataaaattaaggattatgaaactacagattatcagaaagatcggcagacatgcaacagcgatattcctgattaccggaatatgtctgctgacaagtaaagggattgtccctactgggatgattacgctgctgttgcttgcaggagggttcatcggttttctgttcaggatactggtcattattttcaagattcttattcttctgttcattgtaggattatttgtcgcataacccaaaatataaatatacatatatggaaacagttgctataacctcacaagctcctgtcatgccggctgtatggccacagaacgaacatatcagaccggttaaaagacgtctgcccaatacagttgatgaacctaaaaatatcggctactatctggaatcgctacgtgatatttccagcaatccggacagagagaatattctgaaagaattcttcaaggaaacttatgtataaccataaaatttttcaattatgttttttcaatcaatttatcagatgattacagcaggtacggatctgaatatcaatatccgtaaagtggacaacagcctgagcgtagcagtcatgccaaggcggaacagcctgaaagaggatacgcgacagaacatggtgccactgatcgtgaacggaacaccggcagaactggatatgggcttcctgcagaccatactccaaccgatacagaaggtacagggactgcttgtcaatgcggaaaatttcgagaaacaggcagaaaaggctacatcacaggccaaatcatccaaggctccaacaataccggccgaatcaaaggaagccagggaaaaacgggaaaagatggaaaagctcctcaagaaggctgatgaagcaaccgccgcaaaaaggtactccgaagcaatgacatggctgaaacaggcacgggtactggctcctacagaaaaacagaaggatattgacgaaaagatgcaggaagtacagaaacaggctagtgcaggaagcctgttcggtatggcagaggaaccggcgccggtaattccccaaccacaaggctatatgaacggtcagtcacaaccaggtatgcaaacaagcatattcccggagcaacagacccatactatgaatcctgaacctgtcatgcagcctgctccacagcaggtatcacaacaaattccacaaggaatacctcaaccggcatatggaacgaacgggacatataacccacctgctccaaacagcccgatagtaaaaggagcagacataccgcaaggcgcaacaatgcatccttacccacagcagccatactaccagcaagaggcgactccttatccaacacaacagccacagcaaccgacaaacggacatataccgaatggggctgcgcaagtacagaatggaaacggacgggaataccagactgcatcggctacacatgagacattctgcttcgatccggaagacgagaatgacagggaacttctaagagaggacccgtatgcggaatatccggattttccggctgagtaccgaatgaaggacgaggcacaggtagaaatggtatactgctgatatacacaataaacgatttgtaaaaccaataaactataaacaatatggcactggaaattaaaggaatgaaaagagtattcaagatgaagaagaacaatcaggaaatcgtactggatgatccgaacgtaaacatgtctccggctgaagtgatggacttctattccatgaattatccggaactgacaaccgcgaccgtacacggaccggaaatcgaagacgaccgggcggtatatgaattcaagaccactatcggagtaaaagggtaagagcatgaaaaaaggacaacgtaaagacaagaaaccatgtacacaacttacggaacgggctttggaaaatttagccagacttatcatatcggaactcgaaaatacggacataagccggggcatcaggaacagaaagaaaagaagactccctcccgcagaaagcctcatggttttctgaacacgagaataccttccatcgctcccgatctgtatgttgagaatgacagggatgtaacggtaaatgtcaccaccaaagagaatcttgatttcctgtaccgttcagccatgaagtatgcgcagctcctggatgtggagctgccataccatcctacaggcaggacttccacaagagagaaaatatgcctgctatataatgcactggattccatagtatctcatcatgtaaatctggaacttattggtgacaggctccagttctgcatctaccatttccatgaatggccggattatacgcttttctttatgccgatagactttacggaaaggctgcacggtgaaattaaaaagattacactggagttcatcagaaagttcatcaaatatcacaggatgatggatataaccgataccccttattttgagatgtcggaagtctgtatcgattatgtggactttgaacagctcgatgaggaagagaaaaaggatttgtacagaaaggaaaagcttttcaggtcatatgagaaagggagaatccacaggaagctgtgccggatgcactccagggctttctgtaggaatctggaagaacatatccgcaactgtactccttccagcgataaggaaagaagacttttggaactgattaccgaagggctgtccctgattgcaaaggacagcccttatatcttgaattatgattatgattttgcaagcgaaaaggaacgggatttcgagccgccaccgctcgaatatcagattctgcttacatattccatcacggatacggttaccaaagacatggaaagctgtttcagtactgactgtcaggaaacatataaccagactcccgtatcatttaccttcatcacgccggaaacagaggaacttttcaagccggacaactatccggaacggtttgagaaatggtttgagaaatttgtagaacatgttacctataatttataaacatcatgaatgaactgaccaaaaatatgcaaaaaatgatggtaccgaaggctgcaatcatagcctacaagtatgaagacagaagaaatcttgataccaggtactttatagaattacgtccaatcagaaaaagcggacagatgggggcaggtatccccgtcacatacgaattcatgaataccctgctggaatcctatacggaagaaatgagcgggataccggcaggcagagtccctgaaaacatgctggcctgcaatccgagaaaaggacaggaagaatatatctggtacaatccgcccggaaaaagacagatgttctttcacaaggatctcaatatacaggacggcatgttcaatctgccgggaattatctaccaagtaaaaaacggaaacatggacgtgttcgctttcaaggggaaacgtccggtggagacgactccgctgttccgtgccccgttcttcaacgtgaccggatcaagtgtctgccttggcaacagttctctggaaaagccacagaacccgactttcctttccctgctggaatactgggaaaaacggttctggctgactgaattctcccatctgggaggaaatgtcaatcctaccgtttcaaatcttgtcatcgtcaccgaaaatataagaaacaatccgttcgacatgaacgaactcaagcccatgaataaaaaacttaaagacatacttccatgaaaaagatacattttaccgaccgctacctgctcaatccacgtcatccggtaacggtattcgtcatcggagctggaggtaccggctcacaagtgataaccaatctggcacgcatgagcatggcacttcaggcattaggtcatccgggactgcatgtcaccgtattcgatcccgatacggttagccaggccaatataggacgccagcttttcagtgagacggaactgggactgaacaaggccgtatcacttgtcacacgcatcaaccgtttcttcggatacgcatggactgccgaaccgaaatgtttcccaacgaagaaattttcaggatatgatacagccaacatatttatcacctgcactgacaatatacgttcacgtcttgagatttggaaatttctaaagaaaactcgtaaagagaacttcaatgactatttggttcctatatattggatggattttgggaacagccagacaaagggacaggtcatcatcgggacggtacgtgagaaagttctccaaccttcttcacaagaatatattcccatgcctaaaatgaatgtcatcaccgaggaagtggactatgcgaaaatcaaggaaaaagaatcaggaccaagctgttctctggcggaagccctggaaaaacaggatttgttcattaactccacactggcacatatcggatgtgacatattatggagaatgttcaaggaaggaaagacactgtatcgcggtgcctatgtcaatctggatacattgaaaatgaccgcaatcccggtgtaatgacagaagtgaccgtatcatctttccatcagaatacggtcacttattctatttgctacttattatttactacgttcttaccacgctggagcaggaaactctgtatctctgaggcgagatagaatgatttcccgttcttttccaccgagtaatatttaatcttgccctcttgcctgtaacgtgccaaagttctttgtgacacaccaaggagttctgccagatccacattatcaagcagtctgtctccattcatacattctttcagacgattcatctggtccagtttcttttcaatgcgggcaaatccctctaccattgttcctataagtctttcgagtatctcattatctatatatgacataattccaatgttattaagtgaataaatcgatactctcttcgtgcgcactctaagagtatgtacttatagtagtgaaaatagtatgcctgaatctaagacaaagatcaacaagcttattaggcgctgataatcaggcgtataattttttctacttaatatttagtgtaaaccaaaagtgtaaactatgtaatacagaattgggaacgggttaacacagccaccaacaatgacatctgatgctacctgacgacacctaatgacaacattttgtatcatatacatattcaaaatacatttgtacaaactcaacttttttggatatggaaatcattggaattgaaacagctacatatgaaaagacattaaaggaaattgaaaacttccttgataccattgataaattgattacagcttcttcacagaaaacaataggggaatggttggataaccaagaagtttgcctgatcctcaaaatttctccaagaacattacagaatcttagagatacagaccaaatctcttattctcaaattgggaaaaagatttattataaaaaagaagatattcagaagttcattgaaaaacacaacagaaaattatgagcaaggtaattacccaagataatgagcaagttattcagatatacaataggttaaaagatacgctaacaagactcgaagatattctgaagaataacaacccaacacttaatgggcatagatatatgaatgatgcagaattggctaattaccttaaagtatcaagacgcactttacaagaatatagaaataatggaatcttatcttattatcagattggaggtaaaattctatatcgggaatctgatatagaagaacttcttgagaaaaacagacaggaagcattccgttaaacatttcttggaattttcgttgattttcaaagcaaaaatcagtatctttgcaatactgacaaagagttgtatatcagtgcagaacaaagaagttcaatcgaggtgaaataggtggactaaatgacaaacaacaagataagtaattgattattagcgataaaaaatataaggttccgcccccaggcggatcactgaaaacaaaagagaaat

SEQ ID NO: 15 - DNA, 52468 bp, Bacteroides dorei
  misc_feature (12048)..(12049): n is a, c, g, or t
  misc_feature (12055)..(12056): n is a, c, g, or t
  misc_feature (34663)..(34663): n is a, c, g, or t
tgtcatggatacagatattccatttgaatttaaagcttccgatatatctcgcaaatttacctatgctaatattcagagtcatttatccaatgaaccgttgttgcatgacaacacgattcacagggtaggggagtggcgagattctttagaacgcgataatgaatatatgtcacattctgcacatccttttataccagatattgatattacaggcggtaaccggaaaaatagagaagatgatcttccgccattgaaacggaaaaagaaacataaaaataatgatttgtcactttaaaaatatctaatatgaacttccagtcacttttcaaagaatatactccagtagagtatggtgatttttttcgcctttatagaatcaacaataggggttatctcatttattgtaatgaaaataacgtaatttgctgtatggaattatacggttttacggatatttcggttattatgctggctgaattactgaaggttaatttagaagaattggaagattgcgaagagttttccctgcctgttcgttgcagcagacaacaaataatagattatttgtttgatgtttcggcaaaagaaacatatgtgaaactaaaacatgtatctggactgcatggctatttgctcaaatctatacatcaggataaatctggactgaatgcctatcgcaatctttttcaatttgatcccgttaagggaactacaagacttttgtttgacgataatcagtgcctggcttcaatacgcacagataagtctggctctgtatatatctgctgggatcctgtcttgttctttggtctggataaatccggtgatccagactcaacaggatatttgctttcttcatcttcaactttgctgattgattatgttttgtcaaaaatatcttgtgatagagatataatagtaatggctggtagcaattatttagaggctctgcttcttatttcttctctcgttacctcacaagatctttcttataaattatctgttagttatgatgatatgaatgtgaccattcagttcttgaactggcctactcctcaaaagattattaattttatctctcagcttaataagcatataccaaacggttatgaaaagctttcgtgtgttatggtaaataagaaaatatatttgcaggttccggctatccggtcttatttaaaaccgttgctttatttatattatgatttgttgtgtgatggctctttaaaattgtcattattgaaatctgatgcttcctaattattatctttgtgcctattttaatgtatttattatcaacctttataaatagctatatgacaaaatctgaattagttaaacaaatatcttattctactggtatagattacgcaacagcattaacagtagtagaggcattcatgtctgaagtaaaatcttcattggcaaatcaggaacctgtctttctaagaggcttcggcagctttatcctgaagcatagagcagagaaaaccgctcgcaatatttgcagaaacactacattaattgtgccggaacatgatatacctgctttcaaacctgccaaagagtttgttgcttcaataagtaaattgaaaaatatttaatatggacggttttatacaactatccatttatctgtatcacaactatctgtagatggtgtatgattaggataaaattacacaactaaattattttatgttatttttgaatttgtaacataatcaaaatatgaaagatcaacttgctttattaagaaaatgcatcgtaaatgatataccggctatcgtatttcagggcgatgacagctgcacagtagaagtattggaagcagccattgaaatctacagaaggcatggcgcttctcgcgaatttctgtatgacttccagaatgtgattgatgatgtcaaggcttatcagatacagaatccgcacagattgaaactggctgatatgactgaggttgagaaagaacttcttcgtaaggaaatgctggagaaaggtctactgggatgaacataaaacttaccatgtattctgctgacctgagcagtgaactgtcattgccgtttgcagatcaaggtgtgagagctggatttccttcaccggcccaggactacatgactgacagcatagacctgaaccgggaactcatacgtcatccggccacaacattctatgcccgtgcttccggagattcaatgaaggactgtggtattgatgatggcgacctgttggttatagacaaggccttggagcctcaggacggtgacatcgttgtggctttcatcgatggagagttcacgctgaagactgtgcgctttgacgataaggagaaatgtatctggctcgtaccggccaacgaggaatattcacccataaagattactgaagagaacaactacctgatatggggtgttcttacttataacataaagagacagcttagaaaaggaagatgatagcccttgtcgattgcaataacttctactgttcatgcgagcgcgtgttcaatccgctgctccgtgacaaacctgtcgttgttctgagtaacaatgacggctgtgtcgtggcccgaagcaacgaagttaaagcaatgggtatcaagatgggtacacctctctaccagattcgtgaagtccttgaggcaaacaatgtggctgtcttcagctcaaactacaacctgtacggtgacatgagtcgccgggtaatgatgctgctgtccgagttcacgcccgaactgacccagtactcaattgatgaagcgttcctggatctctccggcttcggagaaggggagaagttggtttcctacggtcacaggattgtgaagaccatcggaaagggtaccggcatcccggttacgatgggtattgctccgacaaagactctggcgaaggtggcaagccgttacggaaagaagtacaagggatatcagggtgtatgcatgattgattctgaggaaaagcgcatcaaggcgctgcagggcttcgaaattggcgatgtctggggtatcggccatcgaagcttggataagctgcactattacggtttaaataccgcctgggatttcactcagaaaagcgagagttttgtgcgaaaataacttacaattaccggtgtacgtacttggaaggagcttcgtggtgaatcctgcatcgatgtcgaggaactgccacagaagaagagtatctgtaccagccgaagtttccctgactccggtctgtccgaactctccagcttagaggaagctgtcgccaacttttcttccgaatgtgtccgtaagctccgtatgcagcacagctgctgcacagagataacagtattcgcctataccagccgtttccgtatggatcttccgcagtactgcatcaaccgcaccatccacctgcaggtaccgaccaacgaccttcaggaacttgtaagcactgcagttcgggcactccgcatggatttccgcaaagagggcggttatcagtacaaaaaagccggtgtcattgtctggaacatagttcctgattctgccatccaaaccaacctttttgacaccattgaccgtgacaagcaatcacgcctggccgccgccatagatgctatcaaccgaaagaatggccacaacaccataaaggtagctgtccagggcactacagataagtcatggcacctcaaatgcgaacacatcagcaagcagtacaccaccaacctcgatgatgtcattctcgtgaagtaaaatatggtgctgaatgtagcttatttatttcataattacagctataagtcaattttaatatctacatttgtatagtttgtataaaaacaatgatatccttgttgaatttttatttcgtaacgaaatcaaagttcttcaggagtataaggaaaaagcacatcgggaacttagccgggtacgtgatgaacagaaaacattcgggaaaataaaagtaaatacagaattatgaatcagttacacataacattagaagagaattcacctgctattaaatgggctaatacacaagctgacagaataggggcaagaggacatgtcggtactcacttggattgttatacaacagtaccagagaagcctgaatacaatatcacagcaatggttcttgattgtcagaatgaaatgcccaaagaggaagatattaaaagtcttaccacccttgaaaatatggctttactgttacatacagccaatttggagagaaacgaatacggaacggatatgtatttctccacagaaacctttctgagtgaggaagtccttcatactattttggagaagaaaccgctttttattatcatcgattctcatggtatagcggagaaaggaaagagacatatagaatttgacaagatttgtgaagctaatggctgccatgtaatagaaaatgttgatttatcatgcattggcaatcaaaaggaagttcagttgaaaatattaatcaatatcaatcaccaatcaacgggcaaaccctgtgaattgtattgtgtgtagtcctttcccctgcttataactttataaaagcctttggggagcctaatacccctgtatcaaaaatacagggggcaaggtatccctaacgcaagcatgtatatgtaaaatcacatacccattccaaaaccccggcttcttttcctgggctggtcgagttcttcttccagctgcttctttctctgcggtgcctggttgatatctggaacctggaatattatactatttccctattgttggttctcttcacgggctattatttctttttgtccaataatgtttggggtaatatatattttatttgcttttatcagatattcttcgtaattttataaattcaggcagaggttctggtaatagcctattacggaagacgtgcatggctatgggcggttagggtaacttaaccgctttttcttttcaaattttctttgttaatagaaaatttctgtatctttgctttgtcataagacataaataacttcttacactgtcattctcattcatttcttcaattcttgacagtagtaaatcaaagcacattataatttaagtttatagctgcatctgcagcctatctatcgcaccctctccaggctgtgatagatgtttcctcatttattcacttttcattaatcatttaatcaatttcattatggaacaggtattaattggccagaatgccggcattatctggcatctgctcgaaggtaaaaatggtgtagaagtatctctttttaagagggagtccaagctctcagaatctgagttctgggctgctatcggatggttgtctaaggaagacaaactttccttctctacagaaaaagtaggtaagaagacagtgaagacatactctctgaaagactgattcattgtgcgctcatgctgtaggcttgcttgattcctgatggaataggcaagtctttttttttacaataaattttataacacaatacgttcaaattatttaattttgattttgtgacataatcaaaatttactatttttgtcccaaaccacacaaattagcttatatggaaaataaatttgaactagttgaaaaatataatattgatgtggatgtctttattgaagaaaacggtgtaactcctgttggaaaactccctgacaaccatcttaccaaagagttttttcgcctatattttactggacagattacaaaggtctggaagagatggctttctgaatgttggatgcaaactccttaatctacagacctatattagacgggaaccgctatattacagaacaagaattatcaaaagctctcaaaataacaaaaagaacactcattgaatatagaatgaatggtaaattgccctattacagaataggaggaaagattctgtataaggaacaggatattatagaaatattggaaagaaacaaagtattggcatttgaataatatctcttaaaacattaataatcaaaagataaactttataaaatagcttgtagctacccctaaataattatataaatatttggaggaatagaaccgaacacttacctttgtaaagtcaaaggatgattaacgagaatctatcgaaaattggtgaatttggcatatggctgattcagtggttcggggatttttccaaagatattaaagtgctgtaatttaggactttgaatagtattattcgattcctggtggtaaacagtacgctgaactctacatcaaaaggacaagaggattttgtagatttgaaaactatatcaactacttcatattttttaatttcaatatactttgaactctttactctatttaaggaggcaaaagcatgtattgatatagtaacagagattatcaggataaagtaaaatttcagtttcatagacctgtgttcttcataaaaaaatcccgtataggtcctatagaaccatatacggaatatataacccccaaaaaatcatcaattcatattttgtaaatatctattgtcgactattctttcaagctcttttttaagtttagcagccacctcaggattcttgtcaatcacattcactgattcactcctgtcgccattcaacttaaataactgatcctttggactattccccaactctgtattagtctgtacattcaaagcaggagcattatttctaggaataaacttccattcgccatctgttatgccaaggaagttctgaatattctgtgttacaaaatattctttacccttttccgatttacccaaccatgcatcaagaagattctcactgtcaggcgctgcaccatcaggtaaagttacaccagtcattgcagcaaatgaagcaaaccagtccaattgagacataagcaaatcgttaacacctggtttaacgtgatttttccatctcaagatacatggaatacgtgtgccagcctcatagttactgtacttgccacctctcaagtcgcctgcaggcttatggtcgccaagtaattccacagcctgatccttataaccatcatctatcaccggaccgttatcacttgaaaggacgacaattgtattttcgtcaatacctaatctttccagagtcttcataacttcgcctacaccccagtcaaaagacaacaaagcatcaccgcggagaccgtgtccgctttttccgacaaatctttcatgcggatcacgaggtacatgaatatcatttgtagccagatacaggaaccaaggtttatccgaagccgacttttcttcaataaatcttacggcattggcaatgatactgtcctgaatatcctgatctctccataatgcagatttacctcctctcatatatccaatacgtgaaataccgtttacgatactcatatcatgtccgtgagaaggatgaagtcttagcaactctggattgtcttttccggtaggctcgccagggaaattcttggtataactaacctctacgggatcatctggtgataatcctaaagctcttccgttttcaatccaaatacaaggaacacggtcagctgtcgcagccattatatgcgagaattcaaacccgatatcgcttggatttggagaaaccaatccattccagtcctgctgaccagccttatcaccaagaccaagatgccacttaccgatgacacctgtcgaatatcctgcatcaacaaacatatcagccatagtatatatgtttggcttgataatcatagctgcatcacctgccgctatcccggtacctttctttctccacggatactcaccagtgagcattccatatcttgatggtgtacttgtagatgcaccacagtgggcatttgtaaacattataccctcagatgccagtttctccacatttggagtaataatcgattttccgccataacagctcaaatcaccgtaaccgatatcgtcggcataaataaacaatacattaggtttcttattcacttctgcagcgtcttttttccctccgcatgaagacagcactgctgcggcaattgccggataaaaaaataaatcagttctcatatgttttttctatataggtttataaattcgtttcatcatcattaactgtaacctccaaaaatataactcttctgttttctgtaacagttctatctccaacgtaatacatttacctttaagtccttcatacatgcaaactgcgaaatatgcccgatgccataaggtatcagcttacggcacttttctaagcttaacttaccattctcaacaattaatataggtcttataccatgaatttgcgcagtaggttcatcaggagataataaattatagacagaatcaacaatggtacgaatgctatcatctacaaaacaagtcctattttcgaaaggaatattaatatcttcatcttcagacgatttctccgaacacgaaaaaataaattggtagaaaaaataaaagtttattcataattagttttaagtttttatatgaacacaaaaatataattaacctaccagactagtcgtagatatttctttcgaaattagggggtatttttattttattctatccctttttaagataatctccttctgctttttagtcaatccccttcgatataactcttccaaagaaaaaggaacatcattctttttcatttccggatcattgaaatcaatactcaaatcacagtcgaaccgcaataaaatacttcttctgtttcgaccccacaaattataatgggaaataccccatgttatgccattagcaaacggtacatccgtaaaggcatccgggtcataaagtcctgaagcaattggcatcatggcacaaatacttgcaaccttgaaattcttgccatcctctgaatattgaatagtattattttcatgcccgtctttagccataatcgaggctatcccctgcttgaaacggaaaaactgagtctcatgtccggaactgataatcgggttmaattcatwttttttgaatggtcccataggattatcagytakggmaagmccckgagrgsgratwaaaccgccattatcctttccgttataatccgatttataatatagatatattttccctttataaaccaatggttgagggtcatgaatagaaaattgatcccaatcaccgggttcaccgtttggaataatgatttcatttacgggagtccatggtccgtcaggcgaatcggcatacgacattgcaactgggcagtcatcacgaccggtacttccgctcattacagaaaaggcctgataatataaataatacttgcctttccagaccaatacatccggagttgcaaccgacctccacccaagttccggtttcttcgggcgatgtacagctatcccctgttcttcccaatgaaaaccatctttacttgtggcatatgcaatatcacacaagtcccaatccacagacggaatagtatcattagcaagctttgtccctacaaaggttgttggagtgcaacgcttggtgtaccacatatagtatttaccgtttaccttaataattcttgaagggtctcttcgtgttactgtcccatcatcattatgatagtcaaagcctgtaagcggtgagtacttgaagttcgtgtataattcattcaactgtggagttgcagctccgtaattatcatacactctgttcatagcgcaactcatcttgaaagttggcttttctttaggcataacataagggaatggattctgtgcaaacaagtctgcagaaactcctatcaatactgatactaaaagctttactctcatactataaaaatattaataaaaaaatcaattacgaatatattgataaattaccaaacctaacataggtaaatttaaagtagatagtatgtattttaaaattaaagatttttttctctttatcttagactagaagtattcagtctacatacatagtattgatactatcatcaagaagatcattcttttcacacaatccgccggtccaggtctcatcagcagtccacaaatcccatatgatattcagttctagagtaaaatcctgttttgataccacatttcctgtaggttcaccattcaagtaaaattgaatattgttggcatctttccaccacactccaattctttggaacttttcattccatttcactccttttgccggatttccgtcagagagtttcctgttatcgaagttaccgttatttctttctgtaacaccattcttgacaacaaagtattgcgaatacatagtataaggacgtgtattctcctgtgccttaatagaaggttttgagttatgctcacacatgtctatctcatccctgtcattactgttgccattattcatccagaaagtactgaaagccgaaatatgtgcggtacgcatataacattctgtgtacatcggatatgaaattctcgtattcgacataaccctagaagtcttaaaccacctttccttgccatcgtcaagtgtagccttgatccaaagcaaaccgttatctactcccgagttctcggcaaccatctgtaccggtacgtcataattccataatgacctgtgccattttgtagcatcccagtaatcaaactcatccgaaaggctttccaccttttcccatttaaaaccttccggaacctccggaaggttttgcgcattacaaacaaaatttgctgaaaacatcagcgacaaaaatgatagtaaggtcttcatcatatmcctctaatattatttraaaaattaaaaatctgcatagtaactgtacttacgtgaccgccattatctgggaactttaacgagatagtattatttcccttaagaatgctgtagtccacaggcacttcaataacaccgaagaaagaagcacggtctttctgaacgtcacccctgaaattatccgggatatcaactttcttaccgtttactaaaagttcaggcagcaacgacaaaccatgatttctgccaagtccaagacggataacggcctcaccatattcggtcttcttgacattatttatattgaaaaccagttctttgccagcagcaatctctttaaggtaatccgttgcataatatttcacctcctccatcgtttcgtttattttcacttttctgtcgaaattatagcaaatgacgcatgttgcctcagtttctaaagtaaagtggtcaagactctttgcatcgtatacatcaagcataggtactccgtctttcccacctttaaggtacagatgtctgacttctatactttttgcatccttagatgttccgtttacagaaagattcaaatctactggtttgaaatccagattgtttataatgaaatacacattcttcccgtctacatatgcatcacacataatgtcaggattatcacagtttgtttcaacccttgtacccttcacatccttccagagctgataaaactttataagttcagagtaaacatattctccggtaaagctttcaggctcgttttctcttctcagcattctcgctgtatgtgcaagacccgttttgggattatatccccactcagatttgagcatggcaaaaggcatggcataacatatattatcggtcctttccataaactgcataagcatcgagttggtcgatttcagtcgcagccagtcgcgatatggcgaccatggcttcctgttgtaatcatgcgtctgcgcactgtattccgaaatcataagaggtttaacctcaccaagctttatcatactgtactgctcaatcatatccattgtggcctccatgttactgccttttctgtacatctgtttaccatctttacatggaaaatcgtataaatgaatagtaaagaaatccatatcctttccggcaatatcaataaactgtttccatctggcattccatcttccgaaattctggagttcaaaatcagggaaggcagtgcaataacctcccactttcatatcaggattaaactttttcacctgtgcggcaatagtagagtggaattcaaataatttggttatacttgactttggagctttcggcttatcataaatatcccacaaaggctcattaattmccycacagamcccaggcttaggttcmccnnctttcnnccycctycacmaaaatmctccttaatatmcctgccataaaattcacccgaagctgttccgaaaggctcatcttcagtatccttctgcgataaagcccatcctttcagcgttttagttccgtcaggataaaaaggagagaactgattacaaagaatcagattactgtatttctcgtaaggatgtacctttgtgttctgaacataccgtttcttattctggctacatagtctagccaaatcatctgggtcggcaaaacctggtctttcgggatcctccttaacattgcgaagcacagtcttgatcatacctgtttcacgccccacatacacatcatattttcttataaggtcatcacgtaaatcagcaatcttatttgcactatcccaataattctcatttattgtagcatggaaatttataaacttaggacggttaaactctgttacatccccaagcttatgttttacattcaaattcaattgcacatgagtctgtgcagaagcggytaaatgaacagccataaaacaaaacaagccgataattctgtttttcataaattattttatattaaagtacaatattagtaaagtttatggttttgagaataaaaaaatgctccgttattgaatatcatctaacggaacattttatttgaagcaaagaacttttatcttgatggttcaatcaatatgtctttttccattatactgatattatcatactttttaaccagaataccattttcatcatattcagaatttttcagtcggatattgtatggcaaatatatatcatacaaatagtatttatatatggcaaaatgcaacttttccctaagtaaatgaaaatctctcccataaagatattttttctccactataactagaataaatcaaatccttaactatataaaaagagaagagaccatctcaaaatcattttgagatggtctccataaaataattatttatcctctaccggtttataaattcttatccagtcaacaaggaatgtattattatctttattcattaattctttgtttgtcggagacaatccacttatagctctccagctctggtcttccatgtttataattatatccatttctttcgatagtccggtacccttagtaaaatcattggggtcaataatatttttcccagatacccttcttaccattttaccatcaacataatattccaaattaaatggatctttccagtaaactcctactctatggaaatcatttctccaaatagttccattcacatctttataccaacttccaggatctgttggttgatagtcctgaaacggatctctaataaacacatgatgacttaaatgaattctatcaggtccgtaaaatttatgtccatcatcacctacaaccctatcgctaccatatgcctctataatatcaatttcttgagtatcatcaggacttaacatccatacatccgaagccattgttgagttagctatcttggcatatgcctctacatacacaggatatactactctagttttagatgtaacacaccctgtataagtgccaggcatcattttttctttatctccgcttgtaaccttaactatttttacatcgtcaggtctactggtttcaattcgcaaacaaccatctgagacagaaatatgatctctctgccatattgtaggagctggtcctgaccagttggcatggtaataatcggtccatttcttttcaaaattacctttgttattactgtcagcagtatagttaaagtcatccgactgactctgtaattcccatttcattccagtacctgccgaaactggtacaggaaacttgtcccattcatattcaaattctgtttcagaatcacccgggtctgtatttgatccgttttctgacccattctcttctccattattatctcctggcatacaggaactacaagaaataaataaaaatcctaatgataaaagcaataatttcaattccattctacaaaaaatttaattaataatatctaagaaatagatagggagctaaccctatctatttttaatttactatggacgtttttctattttagtcaatgaaatatcatcaaaatagaaattcaatgctgatgatgatttttcatttgtagctctaatgataattcctgaatctccagctttggaagatgacattttacatgtaacattcacccattgacctttaacaaaatcattattaaaccatacaccagtactccattttgtatctattgcaaaatcaaaagtaatatttggatatattccatttactggagtaccatctaattcttgtacatttatccacatagaaagcaaataatcaacatttgcttctacagggatggcataatctcctgctactttggtatcgcaacccattatcattcctttaccagcagaaatttctgcatatgcaacaccgttaccagaatgagcattatcatttaccatagataatttatagtcgtcccatagagttgctccccaagaaactttatcccaatcttctacagtacaattttcaaaacctacatcatatcctgcttctttcaaaagatttgacatcttgaaatcgaaactttccggttctgaaataaaatttgtagcataaacatagtcaagtgttatcaaattaccaacagatgcatcgtatgaaacagttatattatcggtattataaatatcagtatctaatacaagttttacaatattgacatccgtacttactgattgaatatttgcaactacaggaatcatattttccccgttggttatattcagtgaaaaagcattaacaggacagtctgatgcatctttcattgcacggctaaatttcaaacctatagtattggatgataatctttcagcaccaataaaatcaacaggatcttccgaagctataacatttaccaactctgtatattttatgctgctacgtccaaaatcacttgatgactccaaggtaacctcatacaaccccggtgagtagaactgataagatgcaataccgtcaactgcctcaactgtttctgcctttccatcttcactaacaaaagtgaagacatttttattaggtgcacctgtagaagtaacagtaaaatctatgtgatgaccaccttgcagctcattcttggcgcccgaagctaaatttatttcagcaccagtttctctacacaaagcggtaaatgacgctctaacactatctaaaaccgtaacttcaacaaactgttccttttcattagtaagtccatcctctgtttctatttccttacagaatatttgtttaagagaaatcttatgaactccaggaacaataaaactaactttcaggttttcggatgctgaggttgtaacttccgtagaatctaaattaatggctacaccttcagggaaagtccatgttctggattcaacacctcttgacaaatccagaaatgacatccaaccattaacttgcatcaaattcgctttatttccaaaagaagtagtaacatactcctggactatatcttcgttaaactcatagtccttttggcaacttattcctaaaaaggctaaaataactaataatattttatttattgtcttcatcgtattaaaatttaattctgtaatgctttattattctgaacttcacagctaggtattgggaaataatcgtgaacatccgactgatatacctttgaacgcatctcaaaatcaggacgcacacgttccttaacatttaatggtggaatctgttctgtagaacttattgttgtacttgtaatagacccacataaattcaaacgtataccttgttcttcactccaacattgttcgaagcactctttaaccaatccccaacgaaccaagtcaagccagcgatgaccttcaaaagccaattcaagcaaacgctcagccattcttaaatgcatcaatacattatccttattggcaggaatcatctcaaagtctgtgtaattatttgcaaatttagagacccacaatttagggaaaaatccattattctctgttatataatccttaagttttactacccctgcacgttctcttactttatcaatatattctattgccaaatctacatcaccatcatcttcaagaatagcttcggcatacattaacaaaacgtcagcatatctaatagctctgtaatttatacctgttctacatcctgtagtaggatcctcagattccactctatcccaacgtgtccatttccttactttagaactctgaccatatccaaagtttacttttcctttggcaacaagatttccatcagcatcatattcatcaacaagaggagccttataataatcaccgtcacctttctcaactacaattgttgcgtatgttctcatagagttcaaatgtccagcttttgtccattcagcatcaggatccataacatctgccgaaacaaacatttcgtggcaatggtaggtaggtaacactgtattgtaaccacctgcaaaaagagaagcaaactggtttgcaatagatacaccttccgaaccatctatctcgtcatgcaggtttccactatttcctggcttgtagttatcggagaaagagacttcaaatacagattccttattaaactcattatcagtggtaaagttatccatataattttcttccagttcatataagttgctttcaactaattgcttaaagcattctcttgccaacttccattctttctggaaaagataagtcttacccaacatagctgtagccgcaccccaagtgatatgtccgtcattaccgttgggccatactttaggtaatatttgagcagcctgaaaatccggaataaccattttatttattacatcatcctttgatgaaaaaggaatgttcatttcttctgccgaagaagccattttatcatgtattacggctccaccataagtattggcaaggaaaaaatagtcatatcctctaataaaacgtgcctgagctattatctgttctttcttctcttgtgtaaggaaatctgcattttcaatgtaatgtaatatttgatttgctctgaaaatacctacgtacaattgtgaccaacggttttcaacatatggtgaagagctatcccactttaactgggtgaagatattttgagtactataccatgtttctgtacctgccaaatcacttcttagcatttcgaaagtcaatcctgaaccacttacatattccaactgcaaagaaccatacaatgcatttacagccttatcaaagtcagcttcggttttccaaaacgagccatcagtcagagaattgggattaacttgtgacagcaaggcatcttcacaactcgtaaaagttcccccaataagagagaaacataatatataagctaatttctttatcatagttttaaaaatttcagttaatcaaattaaaaatcaagctgtacaccaaataagaattttcttgttataggatagttggctttatcaacacctcggcttgcaacaccatctccaccaacttcaggatcatatccctcatatttagtaaatgtaaacggattttgtgcagttacatatattcttgcataatccaaaatacctttaaaccactttctaggtaaagaatagcccaatgttatattgcgtaatcttaagaatgttccatcttccagaaagtaatctaatctaggattacaattatatggttcaggtacaggtatatctgagttgatattgtttggagtccacatatcatataattcaacgtgtcttactcctgcgtatgcaaactgttttgcaccgttgtataccatatttttatgtgaataatatagctgagtagaaaaatcaaaacctttataatcagcattaaaagttaaacccatttcaaatttaggcatactgcttcccttataaacacgatccttatcatcaattatattatcaccattctggtttaccagtttcaagtctcccaattttgcatttggcatataagacttaacagcatccagttcttcctgagtctgtattactccatctgattcaattaagaaaaatgaaccagcaggataaccaactttcatatatgttgtaacattatcattattcaaccaggaaccaagtttactattagccaaaggtatttcattcatatcacccaacgaagtaatttcattgatatttttagtgaatgtccctatcaatgaccagttcatgccaaattttgtatgtcctttgtatgtagccgagaactcaaaacccttatttaccatgtttccgatattagaagtaattgagttatttccccaacctacatttgtaccagatgatgcaggaataatcacatcaagcaacatatccttcttattattcttatacatatcaaaactcaagcttaaagctcctcttaataacgaagcatcaagaccgatattctttgatacatttgtttcccatactatgttaggattggaatacgctctctgtatagcacccagacctaactgatcgcctgtttccggtccccaaacataatcaatctggttgcggatgtaagatgcatatttatagtcaccaataccttcattaccaacctcaccataactggctctcaatttaagattgctcaaccaatctacatttttcaagaacttttcttcattaatattccaacccaatgaaacaccagggaagaaagcatatctgttattcttagccattcttgaagaaccgtcgtaacgtccactggcagataacatataacgaccgtcataagcatattgtaaacggaacaactttcctacaattacatgagtagatttagatcctccaattgatgtaagaacatttcctgcatcgaaaacaggtgtatcattactaatgaaatcttttttagacattgcgctctgcacccagtctgtcttttcaatagtataaccgattacagcacctactttgtgctttccgaatgttttatcataacttaatacattttccatagtaagtttcatgcttgaattatcctcctgcaaaagacttgcatcaactctacttgaagctgtgttaaggttcccgtttttatcataaaccataaactgaggttcaaagaaatctcttttatattgccaatagttataacctaaattcacctgataagtaagaccgtcaataatctctatcttaaagtttgctgctatattatgagaattttcaactctgtcatcagaattagtcaatatacgagccaaatatcccaaatgttctacgttgttatcagcatcaatttctacttcacttccatcttccatattcaatggtttcatatatggtttctgatattgtgcaaactgatatacattccaaggctcaacagatttatcagaatgatttaagccaatacttacaaatccactgaaacgacctttcttaaatgttgcatttgcacgggtagagaatctttcgtaaccggaattaataagaataccatcctgtttgaaatagttggcattaacattataagtcataacatcactaccgccacttacagtcaagttataattttgcattggggcattatctaaagttactgatccaataaaatcggtattataatccattgcatcgggattataatataagtcggaagagttaccacctaaagcacgctgatacatttcatcaacatacaactgctgtggtgtactaagcaatggagttcctgatacaatgttctgtagaccataataaccagagaaacttacttttgctttacctgctttaccgcgttttgtcgtaatcaatataacaccatttgaagcacgtgttccgtatactgcagccgaagcaccatccttcaacacatctattgtttcaatttcttccgcaggtaaattaggattaccgtcagccggtattccatctacgacataaagaggacttgaattaccattaatagaacccaatccacgaatttgaataacagcgccatctccaggacgaccggaactttcagtaatattcaaacctgaaatcttaccttgcaaagtttttgtaaaatccgaacctgctatttttagcatttcatcagactttatctgcgaaacagcacctgttaattcttttttcttctgtacaccatagccaatagctacaacctcagcaagcataacagattcttcttttaaagaaacattaatttgtgtttttccattaacagagatttcttgtgtttcatagcctatgaaactgaatacgagagtcgacttactatcagcctccaaaaaataattaccatcaaggtcagtaattgtccctgcggtattatcacctttaacagaaactgtagcacctattataggatctttcatttcgtctgtaacttttccactaatagtaatcttttgtgcactaattgcagatacacaaaacagaagcattaccaataaaggtaacctctcccactttttgtttttgatttccataaattgattttttagcaaacaataaattaatttttttgcaaagaaagtgatagttggtgttttatatatattggaaaagagtttttaatatggtgtatttgcatacaatggcattttttttataaaagttctcatctacaatataagcaattatagacatttaattttacaagtgcaaatatacagctgatggtagatcagattgagtttcaccctggatatacacaagtggatacagtactttattgccagagaaataatattacagtaaagcatggagtccgcttggaaacggatatatgctgcagtatcctgttctatgtgaaatagcatcaagatacaataaatcggtggctcagctatgtttgagatgggtactacagaacaacgttgttccactgccaaaatctctgaacaaagaaagaataattcagaatgccgatgtatttaatttcgaacttacatctgaagatatgaatttaataacgaatatggaaacatgcgggttctccggctactacatagacgaaaatatggaataatacgtttaaacataaacttcccctaaaaaattaaaagtattttataggagaagtactcaaataccatacttttttttcaaaaaaccactgattagttttttttaatggtaatacctttgccaataaagaaaaggattgtttgagcaagtggtatacataattaaggtagattgttttcaagagataacaaacagaattatttaatggttgttgcattgcagcaaccatttattatttaattattaacaaatggcgttttatgaaaacatctgaaattctaaaagcaactctcttacttgttccggcaattgcatgggcagaaggaaacaacgaacaaaaaaaaacaaacattgtgtttattctctcagatgatgccggatatgctgatttcggttttcagggaagcaaacagtttgaaactcccaatcttgacaagctggcggaaaacggaatgatactccaccagatgtataccaccgatgcggtgagcggaccatcaagggcaggacttatgaccggacgctaccagcagagattcggtatcgaagagaacaatgtagtgggatacatgagcaagcacggtaaatacggacttgacatgggtgttcctacttcagaaaagtttatatcaaactatcttagcgaagctggttatgtttgtggagcattcggaaaatggcatctgggagctacagacgaatatcatccttacagaagaggttttgaccaatttgtgggattccgttcgggaggtagaaattattatccttatcagaatgaagaagagtcctttgccgatgagggtgtggaaaacagacttgaatacggattcgctcatttcaaggaaccggataagtatatgacttacctgctcgccgacgaagcctgcaagttcattgaggaaaatgcaaaaaaaactttctttgtttatctggcattcaacgctgtacatgctccgctacaggctgaaaaggaagacctggcgaaatttgctcacctgaaaggtaaaagaaaaagtcttgctgccatggcatgggcaatggacaaggcttgcggacaggtgttcgacaagcttaaagaactgggacttgacaaaaatacaatcatagtgtttactaacgataacggtggacctaacggaactgaaacttccaactatcctctgagcggtatgaaagctaccttccttgagggtggtgtaagagttcctgccataatttcttatcctggtgtgataaagaaaggtagccactacaacaagcctacaagcttcctcgatttcttgcctgctttcatcaatcttgcaggttacgacaaggaaattgcaaatccgctggatggtgtagacattattccctatcttactggcaaaaataacggtcgtcctcaccagactctttactggaaaattgaaaacagaggcgttgtgagagacggcgactggaagttcatgcgtttccctgacagaccagcagaactatacgatataagtaaggatgaaggcgaacagaataatctggccgacaaacatcctgacttgataagaaaatattataagatgttgtcagactgggaaatgacactagacagacctatgtggatgctggaaagaaaatacgaaaagcgcgtgcttgaacagttctatgagcaggaagaatacagacgtcctaaagaatataaataatagacaaataagttataagactgagcgaaggaacggattcttaatgtcaaggctaaacaaacaagtaactttagccttgacacttactttattaaaacaaaagagataagtaagtgatctaaaatatttttatattcaacataaaatattacatttattgtatcatgatattttagaatgtaaatcatgaaacatataaaagtgcttgaattaagtgaggctaatcgcctcgaattggagaaaggctatcataatggccctactcataactatcgtatcagatgcaaatccatattgttgaagtcatcaggaaaatcagcttcagaaatagctgaaatattcgatgtgacaataccaacagtatacgcttggataaaacgttataaagaaaatggtatcaaaggcttaaaaacacgtcccggccaaggtcgtaaacctataatggattgttccgatgaggaagcagtccgtaaggctatagaggaagaccgtcagagtgtgtcaaaagcacgcgaagcctgggaaaaggcttccggtaaaaaagccagcgacattaccttcaaacgttttttaggagcattggtgcaagatataagcgaataagaaaacgcccaaggggtaccccctcaccgcaactctattcatacaagaaagagaagttgcaagaacttgaaagccttgattccaaaggttaaatagaactttaacctgttggcggaattaaaatagcgcatatttaactctgccaataggcttttcatttttgtagttaatatattgaaggattgtaagtgcgctaatcttcccaataatccgggcaaacaatccatctgtatctttcgcataattccttataatcataaactggtcacacaattgcgagaatagggtttcaattctttttctcgctttggcaaaagccggaaatgttggcttccattctttttgattacatctgtatggtacctccaatctgatattggcagtttcaaacaaatccaattgcgcttgggcacttatatatcctctgtcccctatgactgtacaattactataatccactttcacatccttcaggtaatgaatgtcatgcacacttgccttagtgaggtcaaaggaatggatgataccacttaacccgcagactgcatggagtttatacccataataatacatgctttatgatgcgcagtatcctaccccaggtgcttttctaaaatccttctttcccatactgcaacgtttggaacgggcaatacgacatacttctatcggtttcgaatcaatacagaaatagtcttcaccaccatccattttagaaaccattcttctcggattgcattacatagggaggaagttattttacgcctgtcattgtattgtcggcgggaaataaggttgggtatttcaaccctatattcctgtagctttgcaaacaacagcgactcactgtcaataccaacagcctctgatgccatgttcaaggccactacttcaaggtctgagaatttagggacgactcctcgtcttggtacattcccggattcattgactaaattgccggcaatttgcttgcatatgttcagtaattttgcgaatattgcatataagttgtgcatacgatatttgtctattaaaagtttagtcacctttaatttactaaatatcaacaatatgcacaactttttaaacataaatcttttataatttaattccgccaacaggtaactttattatgctgatgaaagtcatgtatgtaccgatggttatgtaccttacggatggcagttcaaagatgagaatgtatatattccatccgagaaagctgcaagacttaatatctttggaatgattaccagaagaaatcaatataaaggctttacaacacaagaatccatcaatgcagacaggcttgtggattatcttgacaggttctcttttgaggtaaagaagaaaacggtggttgtacttgataatgcttctgtccataggaaccgaaagataaaggaaataagaaagatatgggaggatagaggattattccttttctatcttccaccatactctccggaacttaatccagccgagacactatggcgtatattgaaaggcaaatggataagacctgctgattacaatactaaggactcgcttttctattgtacaaacagagctcttgcatctgtagggacgaacttatttgtgaattactcatatgtataaaattaattttgaatagttacttatgaaaaaattttgtttattcttttgcataatatttacttgtataattaaggttttcccgcaatatgtaataaatggcgaagagtatgaattccgtaccaggaatttgcctcaaagtgaagtcaatgatataattcaggataagtatggttttatctggatagcaacacttgatggtctgtacagatatgacggttatgaatataaggcatatttgagtgacgggcaggaaggggctataagtacaaatatgattctgagtctggatattgacagctataataatctgtgggttggtacttatggacgcggattgtcacgttttgactacgaaacaggtgaatttataaattttcccattgagatacttataaacagaaaagatttaaaggggggggacattacagcggtaatggttgactcgcagaatgatatatggataggaatgaattatggtttgttaaagattaaattcgaccataaggaaaatattataacagaaagacatttttttgagttcgagggaaatgcttccagtgacgcaataaaggatatatatcaggatgtatatggtaatatttggattgctaggaatgcatatactgaactggtgacaggtataaaggatgataagctggtttcaaataaaattcacatctcaggcaatatcataactggtgataagagtgctattcttgtaggtggatctaaactgtttaaaatagaacctcatgacggtacttttgataacattactcctgtcctgctatacgataaacctgtatctgcactaataaaagattttgataatatttgggtggcaaatagaaggggtttggaatatctttcccaatcagaggataatgaaaattattcaactcaattcagtcttaataaggagtttgtcaaatctttgaatagcaataatgtgtcatgcttgatgactgactctgaaaacaatatatggattggaatcagaggtggaggactatactcactaaacaagaaagcacataagtttcagaattatatacccaaaggttttcataaagatccttccggtagaaaacagaagagtgaatgtatgcaggtccgtgcggtttttgaggactccgacggtaatttgtggttaggtgaagaagaagaaggggtgttcaggctctctgcagataaaaattataatgatttgtttcaagttgtaaatgtcaattcaaaatatgagaatagaggttatgcttttgaagaaacaaaactcaaaaatggtcgtaaactgatatgggtaggaacaagttttccggcaaatcttgttgcaatagataacaaaactgccgatattgtaaattactcttgtccttcatcacttaaaatgggcttcgtgttctcaatagaaaaaacttcggaaaatgttttgtggattgccacttacagtaatggagttttcagattacagcttgataacaatggaaatgttgtggattacagacatttcactatatataattctgatttatcttcgaatataatccgttctttgtattttgataataaatctaaaatatggataggtactgacagtggattgaattttattgatatcaatgatgaaaatctgaaagtaaaccgtataacattcagtggggatagtgactggttcaatcatctttatgttcttgatataaaggaatataatggaaaactgctgatgggctcaatgggtaatggattaatattatacgactatattaataacagttgcacaaaactgactacaaagaacgggctgcacaataattccattaaaactgtgctgacagatcaggataataatgtatgggtatcgagcaacaaaggtatttccagagtcaatctaacagataacagcattatccattatggaaaagataatggcatatccgaagaagaattcagtgaaatatgtggtgttaaacgtcataacggtgaacttgtatttggaagcagaaggggaattcttgtgttcaggggtaatgaaatagtgaaaaatgagagaaagccaaaagtctttataacagacatgctgactaatggtacatcattaaaatttaattccgagcacagtgagctggtactggattattatgacaggaatgtagcgttcagatttaccggactacagttgtccaatccaggaggattaaagtattactataagcttgaaggttttgacaacgaatggcagctaactaacagtactcagagaactgcaagatacaccaacttgcctgagggcgattatatatttattgtaaaagccagtaatgaagatggttttgttagcgaacatccagcccaattgagtttcaccgtaaagccaccatttgtacgtagcggactggcatactttatttatttcttactgtttgtcgtccttatgtatatatcttatttgatattaaaagctttctatagaaagaaaaaagaagtacttgcagcaaatcttgaggctaagcaggctgaagaaattacacaatacaagcttcagttctttacggacgtgtcgcatgagttcaggacacctctcactctcattgagatacctttggagtcggcaatcaataattgtggatctgacaagaaacaactttattatttgaccctcatacgccaaaatgtttccacattgaaaattcttataaatcagttgttggatttcagaaaaatagaacgtgggaagctacagtttaatccgtatccggttaatgtgtcagatgtggttggagatatttattcgaggtttaagtgtctctcagagagcaggaatataatatattctataaatactcctgaagaagctgcagtttcgatgatagatatttctttatttgagaaagtaattgtaaatgtaatttcaaatgcattcaaatataccccacaaggaggaagtataagtgtatatgtagcgaatgatgccaataccataacagtgtctgtacaggacacaggtgaaggtatttctgaggaagaactgtcgcatctgtttgagagattctatcaaggcaaggagcataataaactcaagcaggctggtacgggtatcggtctgtctatgtgtaagaatattattgatgttcatggaggaaatatcgaaattttcagtaaatcgggtgaaggaacaaaatgtaatattatactgaagagagaacttacagaacatgtgacattgagtgagattccatattatgatatattaaggaaagacactctatcgcttattgacgacgaattatcgtctatggatttttcgaataatgaagttaaacaggagactaaccagtcggaggattcagaacttcataaactgactttactgattgtagaggataatgaccagatgagaaatgtggttgccgagaatctttcttccgattttgaagtcattactgctggaaacggaaaggaaggtcttgaaaaatgtaaggagttttatcctaatctgataattacagatatacgcatgccgataatgaatggtattgacatgtgtattgagataaagaaagatgaggagataagccatattccgattatagtactaacagctaataattctgtcaagaacagactggacagttataatctggctaatgttgattcatatcttgaaaaaccttttgaaatgtccactttgcgtggggtaataaaaagtatattggccaatagagccagattgcaggagcaatactcaaaaaatgctattatatctcctgaaaaggttgccagtacaaagactgacctcaattttatgaccgagattattaatattattaaaagggaaatgagtaatccggagttaagtgtagaactgattgccgatgagtatggtgtttcgcgaacatatttaaacaggaaaatcaaggctattacaggagacacaactttgaaatttatacgtaatataagattcaaatatgcggctcagttacttcagtctggcgagaagaatgtctccgagactgcgtgggagattggttataatgatgtcaatactttcagacttaggtttaaggaaatgtttggtgtaactcctacatcatatttaaaaggaaaatcagaggatgagagaccgtaattcaaactgtgtcaatcctaaacaagcctgattatctcaaattttactttcggataaacacctgaaaatcagatgtattcgaagtaatatttaactaaataaatgacaagttaaagggttgacacagctctatttacgtagcctacgtagcctctatttctaaataaaatcttataataccctgaaatattagttctttaaagcattgtcaataatagcttttattttaggatatttttcgtcagtatcgccaactttttctctaagtttagccagacgcactttcatatctttcagaacatctttatattcgggatcatttgctacgtttttcatttccataggatcctttttcaagtcatagagttcgaaagcaaccggagtttgtaccaccttatgactgcctttatctcttaaccaccacattgaaggagtgcccattgtcttttcgtcataatgtcttccgttgaacaatatcagtttataatcttttgttcttataccaatatgtgcaggaatatcatggtgaatcatgtgcatccagtatctgtagtaaacctcatctttccagtttgcaggagttttaccttcaaatacatcagcaaagctttttccgtccatatattctggagccttaccgcctgccagttcaatcagagtaggagcaaagtctatattatttatcattaaatcgttatgtacacctctttgcttagattttggatctctcacaataaaaggcattctcattgattcatcatacatccatcttttgtcctgcaagtcatgttcaccaagcatcataccctgatcccctgtataaacaataatggtattttcccaaagtccctcttttttcaggtagtcaaacagccttttcaagttgtcgtccacaccttttacacatctcagataatctttcaggtatctttggtacgcttcgtatgtatcctttttaggatcacctgtatttattttatagtcttctgcgtagcttctgttctcatgtcttcttgaaatagaagtaccgatgaagtgtctcagagagtcatttttccctcttgtagcctcagaaccccatccatcctgattataaagcgattccggtaccggaacttctgtatcttcgagataatatttatatcgtggagcatactcaaacatgtcgtgaggagctttatagtgatgcatcaggaagaaaggtttgttcttgtcacgtctgtttttcagccagtcaatagttatatttgtaataacatccgaagaatatccatttgtctttacctgatttttaggccattctttgttacttatttcatttgtaagaaatgtgggattaaaatattcaccctgtcctccatgaccgttaagaactttgtaataatcaaagtttgcaggttcgtttttcagatgccatttacccaccatggcagtctgatatcccattttgctgaattccttcacaagatattgtctgtctacatcaagtttttcgtcaagtgtaagaacttcgttatggtgagagtattgtccggtcattatgcatgcacggctaggagtgctgatagagttcgtacagaaacaattatcgaatactactccgtcactggccagttcatcaatattaggagtaggattaagttttgccagatggcttccgtaagctccaatagcttgcgaagtgtggtcatctgacatgatgaatatcacgttcatcggtttttcctgagccatactgcacacagtgggtacaactgcaataactgttgccaagctgctgttaaaattaaattttaccatggtatgttaattttttattttatgataaacttgtttttctgttgtaataccctaaatatgtatcgttcatatttcgttatatttaaaggcttataaagttttcaaaatatatgaatctgtctgataagccttatttatatctgtttcattttccggtaacaggtatgctactatataatacactttatctttttcatattctacactatattcaagattgaagctggcatatcctgcaaagagtttcctcgaatttctacaaatttcttttttgtctttattatatattattactaccgcattacaattatagtcggctgtatatatcagttccgtgctatatttgttttctttatttttgagtattctattctccttattagttatatttatgttattgccaaacactttattttggctttcttcagtttctacatttatatctataagagtataagccctaacccagtcataatatgttttattcattgtttcatcagcaagttcctcatcgctagggagctctatccatggatatgggtatgtttccactaccatgtttacgcccataggttcagtaaaataaaatggatcgttagtgtctctattatagaattccacacttcctgattgagtgttgtttagatagaaagtggctgaacttttgtctttccaccaacaaccatacacattgaaatcgtccgatggtacacctccatcctctctgtatagccttgtttctttagctctgatgtctttctgtacattttctccctctggagtaaaccaataatgaacatttgagttcattcctttataaaagaaatttccgttgaaatcaccagtcctgcctatacattcacaaatgtcaagttcttgtttaaacattcccggtgcagctccttcaggttgttttccgtcggtaggaaattttccacttctgtttgaaagccaaaacgttgatgagagtgtcgttttatttgctttgaatctgcattcataatagccatagtgagccttttcttctttagatactacagctgcacatgaaatgttgaattcagtaccattaacaactatcggattgttcatttttataccctcaagtaccatacatccgtctttaaatgaaactctttcctcttcaaatagaccgggttcacgacctttccatgtagggtgtggatttatccattttgactcatccaattcactggcattgaaatcatcagtaaacatatcatttacaatccatctttgcccagtagggggtaaagggattgtttttattttttcacttacagggaaagtattttcgggaaattcttctgtattattattgtctgcaccttcctgattattgacagattcttcttgacctgtttctataataacttcattgcagtttgcgaatgttattgcacacaatattaatatgtttgtaaggctaattctttttttcataattaccaatttaaatttacaacagtagcagaactaaatctgctgccgttgtaaatgattataaaaagtattactttgcttggtttttcatttataataaatttatacgaaaatagcttgtcgaatatcttatttgtgatattgtcgtggtttacttaaactcacgtaatttttaatacaaagcaaatttataacttccgaattgatggaatagtaggtgttttgaaattaaagagtgggtattttcgttttttcagatagaatcttggttttcaaggtatccagattgtacaaatagtcagatgcttgttggtaattaaagcacctgaccataaaaatgatgtttttagttcttataaacaatattattgtctgctttcagaacatatttttttgttttctcagtgtcaatattatgtatgaaggtttcttctgttaatgcagcactattcagtgtaacagttctggttttactgtcattacccgcagtgcttaccaaatccacttctacagttttatcaccatggttcatgattcttatagtagacactagtttgtcaactgttttgtctgtaactggttttgctatcacagtaccattgagttcaattctaagaacatgggcatattctgtaggtttctgtttcgggaatttcactttcagacctatatctgtaagtttgaattcaagcttttcttctgatccgagcatacttacagattttatctccacattctctatataatcttttgcaaacgatttgataagaacttcatcatcccatgcaagtgatattgcatatactttattatcacgagttgtaaaacgaatgtcttgagctgtgtattcggttttttcattatctgtcatataaccggcagttcccttgttttctccttcgcctggagtaacccatggacgagagcaatagattgcttcaccattaactttaagccattttcctatctctttaagaacattcttttgttcgtctgtaatagttccgtcaacttttggtcctacgttaagcaataggttaccattcttgctgactatatccacaaagtcatcgataatatggtctggagttttgttctcctcatcaggacagtagctccatgattttttacctattgatgtatcggtttgccatgagtgtttacgtattctgtcacttttaccacgttcgatatcgaatacctggatattatcaccatagccgaatttggtatttacaacaacttccttaccccagtcaagcgcattattgtaataataggccatgaatttatagaaagtaggctggaacggatattttcctacagtccagtcaaaccatatcagttcaggctgatattggtcaatcagttcgtaggtatgcaagaggaattcacgtcttgacttttcgttagaaccttcatatttaccgtagtaaggagtcatacctttaccttcaggctggtgcagacgttcgccgtaaagagaaatactcatatcctgaacatcggatggtgtgtccattccatattcataaaaccaagcattctcgcatctgtgcgatgataacccgaaatgaagtccttctgctatgattgccttttttagttcgccaataacatccctcttaggacccatatctaccgagttccacttattgaaggtactattgtacatagcaaaaccatcgtgatgttcggctacaggtaccacatactgcgctcctgattccttgaaaagctctgcccattcctgtggattgaagttctcggctttaaacataggaataaaatctttgtagccaaattctgtcagtggaccatacgtttctacatgatacttgttaataggatgtccttctttatacatccatcttgaataccattcgctgccgtaggcaggcacagaataaacaccccaatgaatgaatataccgaacttggcatcttcaaaccatttcggtattctgtagttttgtgcaattgatgcagaatccggtttgaatatgtcagtaccaattggagaagctgtagtctcaatgttgggcttgtattccgaattgttacatgcgcttaagcaggcaatagttgcaactgctaatgaagtaatgattgctttcatttttatagtttttataagtttaaagttctacatttattgttgtcttagctgttttaagtcctttagaagtggcggtwatattywtttttycttkyttkttttyktymgamtgramaawtarcatacacataccsctgratgcttttyttttnkggttytatgaacgactccgttgttgcagcattaccgtttcctacagctctaaagtgtcctgcaccttcaacactgaattctaccagattgtctgcctcagggcatagattaccgtctctgtcttcaattcttacagtaatatatgacagatctttgccatcggcagttattacctttctgtctggtataagtttgatttgagctggtttacctgctgttctgattgttttttctgcctttagttcacctaaattattgtatgcctttactgtaagttcacccggttcaaacggaacatcccacgagagacgatattttgactggaatgtgttaggggcataatgattaaacgacaccataatttcagttaggtctcttccttttacccttttgcccaatgattttccgttaagaaaaagttctgcctcataacagttggtgtaaacatatacaggtatgttcattccttttttccagttccaatgaggaagtatatgaaccatcggtttatctgtccattggctttgatataggtaaaatctgtctttaggcaaaccgcacaaatccactgctccaaagtatgatgatcttgaaggccagtcgtcattccagtatccatgggttgaattatctctgcctccgtatggtgtcggttcgcccagatagtcaaatcctgtccatataaattcccccataaagcgtgggttcatttcctggaaatggaactctatatcaggtgggtatgcccatttgggaccgataaggtcgtagcttgtaacctgatttgtgccgtttttctcatatttctctataggtaggtgataaactccacggctacttgtacacgaggaagtttccgagccatataatggaagatcaggatatagtctttgaacttcagcatatttgcctggtttgtaattcattccagcaatgtctacctgctgtgccatgttgttgtcgaatggggcagggtaatagttgaacccacatgtacttggacgtgtaggatcaagttcgcgacaaatatctgcaagatattttgctactgtaaatccttttttcttatcactttgctcaagaatttcattccctatactccacattattaccgacggatggtttctgtcgcgcattatgaggcttgtaaggtcttttttactccactcatcaaaatacaggtgataaccgttgtctactttagcctttgtccattcgtcgaaggcttcatcaagcactacaagtcccattctgtcgcacaaatcaagaaattccggtgaaggagggttgtgtgatgtacgaatagcattcacacccatttccttcataatctgaagctttctttcatctgctctaacgttgactgcagctcccattggaccgttatcgtgatgaagacatactccgttaaatcttattttttcaccgtttaggaaaaatccgtctttcgtaaaacatattttacggataccaaagtcggtaaaatatgtatctgtaaggtcttttccatcatatatttctgtcttcagcttatacatatatggatttttctgtccccagatattaggattcaacatatttatatatgcaagagtttttccctgctccccggcagctacttcaacattatcatttaatattgctaccgtttccccctgagcgttgataatgctatgcctgatattaaatttcccattgccgaatgttgcgtttttcacagttgtttctatctgtactacagcttttggcttagtgacagtaggagttgttacatatactccgtgttcgggtatgtaaaccttgttgtctactcttaaccatacatttctatagatacccgcaccgggataccatcttgatgacagatctcgcggagtaagctgtacagccaatacgttttcttcacctatttttagatactttgttatgtctatctcaaacccggtgtatccgtaaggatgttcgcccaccttaactccgtttatccaaaccttagcttcgctcattgctccgtcgaagccaattcttacaattttgtccttccattgtgcatccccaatgaaggtctttctgtaccagccagtaccatgaaatggcagtccgccgcatcttgcattgtacttgctgtcaaacggaccttctattgcccagtcatgaggtaagttaagttttctccacgaatcatcatcgaacgatatagcttcggctccttttatttcacctttaaagaagcgccagttttcgttgaaggagataccatccgttactgcgtttattgtgttacccagaatgagcaacaggataattgtacctagaagtcttttcattatatttttcgttttaataaattttctcagcaaagttattttccatattgatatatctgactgctcttgtgtctccatcctcacacaagcctttatttccgtcagttgaataggttgaactatagtacctttttcccatcaggtctacaacataagaaagcttcatgttgtcattgctgctttttataatctcatcagtcaccagtttcttcattgtcgccatatctgatatatgaaccagtgaataatctccggaaactaccgcatcatgcaaaagtttcctgttctttttgaagctcaacagaatcttgttctttctgctttttactccattcccatgttttactaatccgaataattccttgaattcttcgtagttattgaaattatagtatagcatatcattctgaagcaattttattaaagactgctactttatcaaatctgctcgtttttattatcttaatttaaaaatataatgatcaatctatcgaattatctttgtacacgtccgcttgcatcaccaccagccaaagcttcaacttcttcaatagataccaagttgaaatctccattgattgtatgttttaaagccgaagctgcaactgcaaactccaaggcctcactctgagttgctttagtaagcaagccatggataataccaccagaaaaagaatctccaccacctacacggtcaataatcggattaatgtcgtatcgttttgatgtatagaattcttcaccattgtaaatcatagctttccatccgttatgtgtagcagagaatgattcacgcaaagtagagattacatatttgaatccgaactctttggccattgcagtaaaaatacctttgtatccttctgcatctgttttgcctccttctatatcggcatcaggcttgaatcctaaacaaagttctgcatcttcttcatttccaatacatacatcaacatattgcatcaatggacgcataatggactgagccttttctttagtccaaagtttcttgcggaaattaaggtctactgagactgtaacaccatgacgcttagcagcctcacaagcaagtttagtcaactcggcagctttatcagaaatggctggggtaataccagaccaatgaaaccagtctgctccttccataatagcatcaaagtcaaagtcacatggttctgcctcagagattgcagagtttgcacggtcgtatataactttacttggacgcatagaggccccagtttcaagataatatatacctatacgatcaccaccacgagctatatagtcggttctaacaccatatttacgaagtgcatttactgcagattgccctatttcatgcttagggagcttagaaacgaaataagtttcatgtccgtaatttgagcaacttacagctacatttgcttcaccgccgccataaacaacatcaaaggaatctgattgaacaaaacgtgtattgcctggtgtagacaatctaagcattatttctccaaaagttacaattttcatcgtctattatttttaatattaataaataaagttaatttattgtcagaatgaattacttgctatttcacatttaccgcattacccattgcaatgagaaccactcccagcaacatagcaacaagagcaaaatacaataatcccttcgcttttttaggagcatcagcccactctttagtaagaagtccgcctatcaccgccagaaggacagatactgtattataaatggcataaccaactgtattgcctgccgaacctaaagaaaaagcagcgtacgcaaaagatgcagaagcagtataattcaaaaatgccattacaaatgccatccagaaattagacaaacagtattcattcttaaacagaccccacgtcttattcttacacaatttaattacaaaataaggaatagcataaagagctccggaaagatatataatgaacattattgctatagcactcatccattcgggatttccctgtgttacaacagcctctgtaataggagcattacctacagcgtttgccagactgaaacctgtagctaaaagaccacctataagagctatgaatattcctcgcaaagtcttgccagacgaaagttgttccattgaatctttatgttccgaactttcttttcgaagtataccggcacgcccgtttgatactactcctataagaatgattataagacctattattatataccataaagcattttcagaaggcaatccgtcgacaatgaatggcaaaatagaacctaccaatattacagaacctataaatattgagaaacccaatgaaactcctatataatctattgccttgctccatagctgcactcccattccccaaagaaaagatgtcagtaccatgagataaagtacattcgaaggcaatgatgcgagaacatcacaaaaattgtctatcaataaaaatgaagacaccaaaggcattactatcaatgccaggaaaaaaaacagaaaccaggtattctcatatttataacctttaatatatttctcaggcaaagcatacaagcccaacataattccggctcctacagcccataatattccatttatcataattttattctgttaaaaattaaatttaaatattgtatgactctcaaatttctcacccctgtcggtaaaaaccttatttgcatcttttaaattaggaccattaggtactctatgtgtctcacaacaaaaggcacagtacttaccatatttctcactttcatttctttgtaatgaagacgaagtatatttggctgtatacaggagcattccttcttctgtcgtcagaacttccatacttacattactagaagggcaattaatctcggcaaccttctccggaacatcagtaaatcccttatcaaacatatagaagtgctcaaaaccatcatttatctcattatgaacctgacctatattccttgaactacgaaggtcgacgctgctgccagatatgtaaataatattcttttctacactgcctgaaggattcattggcaatacattacttgctgcaacatatgcattatggccttctacattctccataaatcccgaaagattgaaatatgtatggttagtcatggatagtggtgtacgcttatctgtatccgcttcatatctgaaacttaattcgttattattattaagagcaatgataacaaccgctgttacattaccagggaacccctgatcaccatcgggagagaaatacttcaatgttatagagctttcattttcaaagctatcgcatccgataacaccccatacttttttatcaaaaccctgcacacctccatgaaggcaatgggtattgtttacatttgctgaaagtttcacgtcatcataggacgcattttgaatggtggcgcaataacggccaattgtagctccgaaataaggtgcattagaaagaaactcatcggaaaaatagccttcgagggtgtcaaaaccacaaactatattccttttatttccattaccaacaggcaataagacagacgtaacagttgctccataattcattacagagacttctacaccattatcattaacaagtgtatataatgtgatttccattccttcgacggagccaaatctctcttttcgtattttcatatatcatagttttaaagttattaagttatattcttttgataacaccaatgaggttatatcaaatataatgtttgatatagcctcattgagaaaagaagatattaaagcttcttgtatggttcaagcatttcccagttgaactctactccaatacccggttcatctgacgctatagccatacaatcctgaactaccagcggacgacgcgtataacggtctatcggaaaactatggacttctatccaaccggcatgtctctgtgatgatacaagacttacatgcagttcctgcattccatgcgaacatacagttacgttgtgttcttcagcaagtttggctgcttgaagccatcctgttatacctccacagtttgatgcatcaggctgaacatatttcagtttggactgttccatagcatattcaaactcgtgtatggtgtgaagattctcacccatggcaagaggcatgcctgttgcatcagtgatttgagcgtagcctttatagttgtcaggaattgtaggctcttcaaaccaggttatatcgtattgcttgatacggtttgccatatcaattgcctgctctactgtcatggaataatttgcatcaaccataaatgtaatgtcaggtccgataaactctcttacagccttgattctttcaacatcttcatcaggattttcgcgaccaatctttattttaacaccattgaaacctgctttcagatagccatcgatattcttcagaagtttgtccaaagggaacagaaggtctattcctccacaatatgccttacatttgtttgaagctccaccagccatcttccataatggctgaccggcatgcttacatcttaaatcccataaagctatatcaactgcagaaattgcgaatgaagcaataccacctctaccaacataatgaatatgccattgcatcatgtcgtaaagctcttctatattgtctgcatcctttcctataagtgcaggaatcaggtcattgtcaatcatggccttgattgaatagcctcctttaccaccggtataggtataaccagtgccttcacttccgtcttctaattttattgtcgctgttattagctcaaaatagaaatgatttccatgctttgcatcggcaagtacctcatccaatggtacttgaaacaattgcgttttaacagacttaataatatgtgacatcttattattctttataacggatatagaatgttttcttctcaagatactgttcgaaaccatacttgccatcttcaccggcagctccactcagcttgtagccattgtggaatccctgatgcaattcaccatgaggacggtttacgtaaatttctccgaactcaagatcggtatttaacttcatgacacggttaagatcattagtaaataccatagcggccaaaccgtattcgcaatcgttagcataattgattacttcatcatagtcggagaatttcagaacagggagtataggtccgaaagactcttcgtgtacgattgtcatattttgtttcacatcagtaagaactgtaggttcaaaccagttacctttctggaattgctcaccttcaggaactttacctccacatgccagtgtcgctccttctttcaaactgatttctacaagctgtttcatgtgttcaagctcattcttgttgacctttggtcccatatcagatgttggatcgaatgggtcgccaaccttaatcgctttaactttttccatgaatttagccataaattcatcatatatcgactcgtgaagatacaggcgttcattacatgtacaaacctgaccacaattatcaaaacgagaagaaagtgccgcatcaacagccgcatcaatatcagcatcatcgaatacgatgaaaggtgcctttcctcccaactccaactgaacatggataatattcttagccgcagaacggtaaatggcctgacctgccggagtactaccagtcatagtgaccattttggtaataggattttcaaccaaagctgtacccataactctacctgaaccggtaataatattgagaacgccatcaggaacaccagcctttttggccatctcacccaacatcaatgttgcaataggggtttcagtagtaggttttacaacaattgtattaccagctacaagagcaggacctatctttctgcctgccaaagccaatgggaaattccatgctgtaattgccactaccacaccacgcggaattttctgaatcataagatgttcattaggattatctgaagggacaatatcgccttctatccttcttgcccattcacatgcatatgcaataaaagaacaacaaacatcaacttcaaactgagcaaccttgaacagttttccttgctctgtagaaatcattctggcaagttcttccttatttttctttatttcttcaataaaggcataaagtatttcggctcttcttctggctgttagttttgcccatgatttctgagctgcctgtgctgcctgtaaagcaagatcggcatctttctcatcaccgtttgcaaccattccgacaactgagtcgtccgaaggattataaacttcagtatattttccatttaatggtgcgacccacgcaccattaatatattgctgatatgtcttcataagtatttcaaaaaaatagtatttataacaatattatctacccatccagccaccgtcaaccagcatgattgttccatgcatataagcagaagcttctgagcaaaggaataccaccggaccaccgaaatcttcaggagtaccccaacgtccggcaggtatacgagtaagaatctgctcagaacgtactgaatctgcacgcaaagcagctgtattgtcggtagcaatataaccaggagcaatagcgtttacatttacacctttaccagcccattcattagcaaaagccatagtcaactgaccaacagcacctttacttgcagcataacccggtacatttatacctccctggaaggtcaacaaagaagctgtaaatacaattttaccattgcctcttgccaccatatcctttccgatttcacgtgtcagaataaactgagctgtttcatttgtagcaataaccttatcccacatctcgtcagggtgttcggctgccggtttgcgcaatatagtacctgcattattaatcaaaatatcaattacagggaaatcagccttaactttattgataaaatcatacaatgcgtctctgtcgctaaagtcacaagtgtatcctttaaagttacgacccaaagccttaacttctttttcaacttcgctaccttttggctccaatgaagcactaacaccgataatatcagcacctgcagcagccaaagctactgccatacctttacctattcctcttttacaacctgttacaagagctgtcttgcccttcaaactgaatttatttaaaaagtccatattattatttagtttaaaatcattaataatgtaatttgtcacttgttaatttattatttacccttggcagtctaccaaatatttcattccactaggattgcttacgatttcttcgaataatgactgtatatttgtcaaaggctgaacattagagatgatgttttccaacggaagaactttctgattaaccaaatcaatagctttttcataatcttcatattcataaacacgagctcccatgaatgtaagttcacgccagaacatcatcttcaagtctacaggtcttggttgagcatgtatagcaacacctactatacgggcacgcaaaccggcaatttctgtcatagcgttaaccgtactctgaacaccggcaacctcaaagacgacatcagccaaagaaccgttgcttattttcttgacatattccaacaggtcttgttcagctggactgattacatcaaatcccatctctttaagaagctttattcttacaggattaacttcagaaacaacaatctttgcacctgttgtttttgctaccattgccaccaaagctccgattggaccaccccctaaaactacggcaacttcaccggctttcaatccgctacgacgaacatcatgacaagctacagccaaaggttcaattaaggctgcaagtttcaggtcgatatcatccggaagtttgtgtaaagtgaacgccataatgttccaatactgctgcaacgcaccttcgctatcaataccaataaatttaagttttttacagatatggctccaacctttatcagaagcatcttcaagacgattatcgagagggcgaacaactactttatcacctactttatatccttctacaccttcccctatagcatcaattactcctgacatttcgtgaccgatagtctgcgggatagaaacacggctatccatattaccatgaaagatgtgaacatcacttccacatataccacaataagcgaccttaattctaacttcgcctttagcaggtgcaattaattccttttcttttacagtgaaggttttatttccttcataataacttgctttcatttctttataatttaaaacatttaactatttagcttttccaaaacctttggctacaggaacttcaatttcactattataattctgtccatctgtctgaatcatggcaggataatatcggtaataatttccgttagtatatttgtgcaatgacttggacatctttttattcatttcattaaactgtttagtagcttcagcctgatcgccaatcaagaagaaatatttatttgttgagatttctttaccgcccttgtctgtcagtgtgagtccaacatggaacatcttcttaactgtagacagaacattataactgatatcagtgagtttaaatgcacaattctcgcctatcttacttaccttgtagtcagcctctttaagaacattacccacatcgtcttttatacggatagtaacatttgagttcttatattctttataaaggtcgttaactatccatattgcacctttgaagctttcatcattatgccatctgcgccttgtgaaatcaagacatacaagcaatggctgataggctctcttaacaaaatcgtacgatctcttaggctgttggtaggcatctacaataccccacttcatgtcaggccagtaagttatccaatgacaaagggctattccgctaagtcttggtttctgacgtcggaagaactctacaccattctggaatattacaccttgagcatcctgagtagcatctacaaactcctgcaatgtcccattggaacgttcttcaccgaatgtatcgaagttttgcatcttaagcttatccaaatcagcccaatgatgtccccagctcaatccgggaggccacatctcagcttcaggaatgaatttcttgagactctctacattgggtacggaggttatggcaaactccggtacgatagggtaatcctgctttctgtaccaatcctccatcagccatcggcccattgaatagaaatacgccaatgcatgggttgcctccttaggtttataaccggcctcttgcgaagcggcacatgttagaggagaatcggggacataaggcaatggaagataatgctgaagggtatcacccaattgcaacagaaagtcattggcaaacttaacatctctggttctcaagaaatattcctcgcctccttccatcattatgagcgatggatgattacgacgttctattgctacactcttggctacctgcaatactttctctacataggatttttccattggaatattaccggaacccaatggcaacatatcctgccataccgttagacctaatgaatcgcatatctcataaaattcaggtatttcaggattatgccagccaaatattctgatattattcaaattggcttccttggccaaaacaagaagtttctcgtatgttccgggagctgtacgacccacaaatatatttggtgtgcctccccagcatgctgaacggataaaaacaggtttaccatttataactgttgtacgtggaaaacttacatcaacacccttcttaaaacctggattccatgccgaggttacctctctgataccaaacttaacctccttataatcgtgtctcacacttccgttttgagcggaaactctggctatgtacagattctgcttacccatatcccatggccaccacaattcaggtttgccaacatggaaattcttcttatacatatgtttgccgggaggtactgtctgtttgaacttgaccagaataggtttcgactcaaaattatatccctgcacagaagctgttatatccatcgacattggttcgcttgaagtattttcaagcattatctccatatccacatcagcactagagttcttgtttatcctggtacgggcataaacatcgtctatcctaaccttaccggatgtcacaagtctcacaggacgccaaattccgaatggaatcaggtctcgccaatagtcgccgaaccatggagtcttcaaaccgccaagttctgtattgatatgagtaggaggattaagcttgacagtaagcatattagcaccgcggcgcgcatccttacctattcttaagtagtctgttacttcaaaattgaatttctcgaacgctccgtcatgccttcccaaataatgtccgttgagccagacatcgcagctatagtcaacaccgtcgaattcaagacggatatacttgttctttacatcctctgtaacataaaactgtgctgcataccaccattcatagtgctgaacccactgtgctttaactgagttcctgccaaaataaggatcgtctatggctccggctttccacaaatcagtgtaaacatcgccgggaactttagcaggattccaaaccaatgtctcaatatcctcagggaaaattttatggattccctgcttttcaccttcaccaggacgcatcatcttcattttccaattataaccgctcaagtctttaacaagctggttgttcattgaaaatgattcgaagcccggctgcgcatttgaatatgcaataccaagcataatcaaaagcgcagacaagatatttctcttcataagctattattttcgctttgttgattcaccaattgcagtatgagtctgtttagtccatgtttcaaaacgcataatgcattgataattataggtaatgtattgatgagtcaatccccaacgcaatatttcagtaggttccttatcattatcagcacttctgttcagaccaatagcatgaggtgctcctggtataacggacattatctcgaagtttatgccgtctggcgaccactgcaaggtattcttttccggtccgtctgttgtaatcaaagatgctatacctcctttataaggccatacacatatctcgtgtccactattgcttataggattatactctgatttggtataaggaccaagtggattatcggctatagctacaccatgtttgatttctctacctccccaggtaatttcctcacccattctttcacctttataataaagatagaatttaccattgtatggtatgatacatggatcatgcactttatgactgtcaaagtcacctttagcttttactttaaatctattatcctcttctccttcccaaacgccattgtcggatggggtaagaaccggcttatcagtcttttcccacggaccatcaggagaatcagcccatgccatagcaacattttccttaactctaactgtgtatggcgatttaacagtctggtaacaaagataatacttaccattccactgcataacttcaggagtgaaaaccgatctgtcatcgtatgctcctttttcacctcttttaacagccacaccttcttctttccaggtaataccatccttacttgtggcataccatatatcgcatctgtcccatggaaaaaccttttcattttcaacatccccggcaaatccctgagtttcaccataactttttgaataccatacatagtacttgtctccaaccttaatcatagcacttgggtcgcgtctaactataccttcctcataagccaaatcaccttttaaaggcatcatcttatattcaaagaaccacgaattgtcacgctgcggccattccatggcacgtttcatcgcagcacttaatttatttcctttgggtattcccaaagaatccgctttacgctggtcataagcactatcatcagtagacactgtagcagaaggctggtttacacaggaggcaaacaacgctatacctcccactattgttaatacattcttcagtaacataattattataattaaatcatttaacttcaacctttaaatcatttgaactaatactgccagaatttgcattgatgttcagaatgccggccttgtccgtagcctgcaacactagcaatgctcttcctttataggtttttactgtatttgatttatagtttaaaacattcagatgatcgccattttccacacccaataatctgtaattgccaccaatattaaatgttatttccttttcttcccaagaaatatttcttccgttcctatcaatcaattgtgcagtaacatgtatcacatccgtattattagcatcaactgcaaccttatcaactgatagcttaattgaatttgtttctttggtggtataaattgcagaagttgttttcttaccgttctttttacctttagcaactatatttccatctttaaaatctaccgaccacttatagatatgatcctcaaaatctttcaggaagcgttttcctaaggatttgccattctggaatagttctatctcatcgcagtttgaatatatctccacaacaactttttcacctttagtataattccaatgactgtttacatcctcccaaacccaaagtcgttgagtccaaggctttttaggatccttatcagtaaactttccatccttttcaacataagaagacttgttggctgtctgagaatagatagcaataaatggcgcatcagtccaaagtgatttcatcatatggaaagaaggtttttcaaatcctgccaaatcaagcagtccacatccgatagctctttgtggccattctctaccttttgttccaacttctcctaaataatctacacctgtccatataaacataccagggatatagtcacgttcgataaccgctttccattcatgccactgaccgagattttcagtacccattgcaggtttgtcaggataattcttgtgggcataatcatacattactcttctatagctgaatccggctacatcaagagcatcaatatatcctgtctcataacttatagaaggaagtatacaattagctgttaccggacgagttgtgtccatctcacgagtccatgctgccagtttcttcgctgtgcgaccaatatcataagtctgcttaggctgtttagcccactcttccctgattctctgagttgaataaggaggctggttccagaaatatccaccaccggcatctgcactaaagaaacctgttgactccttacatcctttataagtccattctatttcattaccaatactccactgaaatatacatgggtgatttctacttctaagcattacattcttaaggtctcgttcggcccattcctgaaaatattcgcagtatcctcttgttatataatcaatggactgttcatccatgtttaatcgcttatcttttggataatcccattcatcaaaaaattcttcctgaacaagaaatcccatttcatcacaaagctccaggaaagcatctgcaccaggattatgtgacaaacgaatggcattacaaccaccatcttttaaagtctgtaatcgtcttctccaaacatcttcaaccaatgcagctccaatcatacttgcatcatgatgaagacaaacacctttaatcttcatgttctttccgttgaggaaaaatccttttttagcatcaaactttatacttctaataccaaaaggagtttcttttgtatcaacaacgttaccatctacaagaatttcgctctttgcaagatacattgaaggagaatcaacatcccaaagggaaggatttgatatttctaccgactggttgattttcatttcctttcctgcctctatcaaaaaagatgtcagtttctcgcctactttcttatttttggagtcaaaataagaagttcttacttcacctgctcttggtccggaatagtcgttcttgacccttacctcaatatttacggttgctctttcagaggaaactacaggtgtagttacaaaagttccccaaacaggaatatgcaacttatcagtaaatatcaactgagtttctctataaatacccgaaccggtataccatctgctgtctgcatatctggaatggtcaattctgacagaaattctgttttcttgtcctttcggattcaaataatctgaaatgtcataaaagaatggagagtatccatatggatggaatcctaattttctaccatttatccaatattcagaattattgtacaccccatcaaaaactatatagcatttcttatcaacgaaattgtcgggtgtatcaaatgttttactataccaaccaattccacctttaaggaaaccggtgcaaccttccgctgtagactcaaaaggaagatcaacactccaatcatggggcagattcactgttttccacgaagacggattatagtttacaaatgaataacaggcagaatcagaaagtgtaaacttccacccgttattgaaatcggaattattatttaacgcataagcgttggtaaaaagactggtcagaagaagactgacagttactaaatgttttctcatggttttaaaattgaacattagtatttgattttctgatgcaaataaaaaataaagtattgatatggatgatgggagaaatattaaaaaaaacatggtgtttttatatgcatggtatttaaaaaccagaaataatgtaaatgagaacagtaattactatataatattgtgcttaaaaaattacatcctaatggacaggatacaaaaccaattcaacaataatttcgcagtcataaaaatgatttctaacaatcctagtagaattcaaattattaatgcgaaaattttttataatcaatctattctatcatatcgcataagttactcagaaagaaaatatacctatcattaataatttaggtttctgtaaactttgtacttcatcccaagtaatcttctcttactcccaccacccctttaaggtatgtcgctaaagttccttatctacccagagtataatcggtataactcgtttttctattgtctttcattggtcttttctgctgtccgcttcctcatttatcggtgttcccccatctaagagcctttctttttatacggcaaaggtatatggtcgtggtggaaatgaaagagttccggcctgcagcctttgccctgaaaaaaataacgatgttgtctgcgactgccccaacatttttttcgttcaaaacttttctaattccactcgcccgtacctaaagaagccgtaaaaaaaaggctcaaactcagatggggaatgattctcaatctaaaaaaaagtcagcggacaaaagaccaaaccaagacaaaggttttcaaaaaaaaggtctaaatctagctgaagaataattcaagtttttaaccctctaaagcatacggatatgagaaaaggtttcgaagttaacggcgattacagactgatggacagttcagaacttgtgtatattcttaccaacagcgcagtgatggtaaacaaggtacaggaaaaggaagtggtttatggcgaagagtgca

SEQ ID NO: 16 - DNA, 52469 bp, Bacteroides uniformis
  misc_feature (220)..(220): n is a, c, g, or t
  misc_feature (8966)..(8967): n is a, c, g, or t
  misc_feature (8986)..(8987): n is a, c, g, or t
  misc_feature (12054)..(12054): n is a, c, g, or t
  misc_feature (12080)..(12081): n is a, c, g, or t
  misc_feature (12087)..(12088): n is a, c, g, or t
  misc_feature (34597)..(34597): n is a, c, g, or t
  misc_feature (34617)..(34618): n is a, c, g, or t
  misc_feature (34661)..(34662): n is a, c, g, or t
tgccaaagataggtatattccatttgaatttaaggcttccgatatatctcgcaaatttacctatgctaatatacagagccattttgatagagagcctttattgcatgataacacgatatacagggtaggggagtggcgagagtctttagaacgcgataatgagtatatgtcacattctgctcttccttttataccggatattgatattactggcggtagncaggraaaataragaagatgatcttycgcctttgaaacggaaaaagaaacataaaaataatgatttgtcactttaaaaatatcaaatatgaatttccagtcgcttttcaaagaatatactccagtagagtatggtgatttttttcgcctttatagaatcaacaataggggttatctcatttattgtaatgaaaataacgtaatttgctgtatggaattatacggttttacggatatttcggttattatgctggctgaattactgaaggttaatttagaagaattggaagattgcgaagagttttccctgcctgttcgttgcagcagacaacaaataatagattatttgtttgatgtttcggcaaaagaaacatatgtgaaactaaaacatgtatctggactgcatggctatttgctcaaatctatacatcaggataaatctggactgaatgcctatcgcaatctttttcaatttgatccagttaagggaaatacaagacttttgtttgacgataatcagtgcctggcttcaatacgcacagataagtctggctctgtatatatctgctgggatcctgtcttgttctttggtctggataaatccggtgatccagactcaacaggatatttgctttcttcatcttcaactttgctgattgattatgttttgtcaaaaatatcttgtgatagagatataatagtaatggctggtagcaattatttagaggctctgcttcttatttcttctctcgttacctcacaagatctttcttataaattatctgttagttatgatgatatgaatgtgaccattcagttcttgaactggcctactcctcaaaagattattaattttatctctcagcttaataagcatataccaaacggttatgaaaagctttcgtgtgttatggtaaataagaaaatatatttgcaggttccggctatccggtcttatttaaaaccgttgctttatttatattatgatttgttgtgtgatggctctttaaaattgtcattattgaaatctgatgcttcctaattattatctttgtgcctattttaatgtatttattatcaacctttataaatagctatatgacaaaatctgaattagttaaacaaatatcttattctactggtatagattacgcaacagcattaacagtagtagaggcattcatgtctgaagtaaaatcttcattggcaaatcaggaacctgtctttctaagaggcttcggcagctttatcctgaagcatagagcagagaaaaccgctcgcaatatttgcagaaacactacattaattgtgccggaacatgatatacctgctttcaaacctgccaaagagtttgttgcttcaataagtaaattgaaaaatatttaatatgtacggttttatacaactatccatttatctgtatcacaactatctgtagatggtgtatgattaggataaaattacacaactaaattattttatgttatttttgaatttgtaacataatcaaaatatgaaagatcaacttgctttattaagaaaatgcatcgtaaatgatataccggctatcgtatttcagggcgatgacagctgcacagtagaagtattggaagcagccattgaaatctacagaaggcatggcgcttctcgcgaatttctgtatgacttccagaatgtgattgatgatgtcaaggcttatcagatacagaatccgcacagattgaaactggctgatatgactgaggttgagaaagaacttcttcgtaaggaaatgctggagaaaggtctactgggatgaacataaaacttaccatgtattctgctgacctgagcagtgaactgtcattgccgtttgcagatcaaggtgtgagagctggatttccttcaccggcccaggactacatgactgacagcatagacctgaaccgggaactcatacgtcatccggccacaacattctatgcccgtgcttccggagattcaatgaaggactgtggtattgatgatggcgacctgttggttatagacaaggccttggagcctcaggacggtgacatcgttgtggctttcatcgatggagagttcacgctgaagactgtgcgctttgacgataaggagaaatgtatctggctcgtaccggccaacgaggaatattcacccataaagattactgaagagaacaactacctgatatggggtgttcttacttataacataaagagacagcttagaaaaggaagatgatagcccttgtcgattgcaataacttctactgttcatgcgagcgcgtgttcaatccgctgctccgtgacaaacctgtcgttgttctgagtaacaatgacggctgtgtcgtggcccgaagcaacgaagttaaagcaatgggtatcaagatgggtacacctctctaccagattcgtgaagtccttgaggcaaacaatgtggctgtcttcagctcaaactacaacctgtacggtgacatgagtcgccgggtaatgatgctgctgtccgagttcacgcccgaactgacccagtactcaattgatgaagcgttcctggatctctccggcttcggagaaggggagaagttggtttcctacggtcacaggattgtgaagaccatcggaaagggtaccggcatcccggttacgatgggtattgctccgacaaagactctggcgaaggtggcaagccgttacggaaagaagtacaagggatatcagggtgtatgcatgattgattctgaggaaaagcgcatcaaggcgctgcagggcttcgaaattggcgatgtctggggtatcggccatcgaagcttggataagctgcactattacggtttaaataccgcctgggatttcactcagaaaagcgagagttttgtgcgaaaataacttacaattaccggtgtacgtacttggaaggagcttcgtggtgaatcctgcatcgatgtcgaggaactgccacagaagaagagtatctgtaccagccgaagtttccctgactccggtctgtccgaactctccagcttagaggaagctgtcgccaacttttcttccgaatgtgtccgtaagctccgtatgcagcacagctgctgcacagagataacagtattcgcctataccagccgtttccgtatggatcttccgcagtactgcatcaaccgcaccatccacctgcaggtaccgaccaacgaccttcaggaacttgtaagcactgcagttcgggcactccgcatggatttccgcaaagagggcggttatcagtacaaaaaagccggtgtcattgtctggaacatagttcctgattctgccatccaaaccaacctttttgacaccattgaccgtgacaagcaatcacgcctggccgccgccatagatgctatcaaccgaaagaatggccacaacaccataaaggtagctgtccagggcactacagataagtcatggcacctcaaatgcgaacacatcagcaagcagtacaccaccaacctcgatgatgtcattctcgtgaagtaaaatatggtgctgaatgtagcttatttatttcataattacagctataagtcaattttaatatctacatttgtatagtttgtataaaaacaatgatatccttgttgaatttttatttcgtaacgaaatcaaagttcttcaggagtataaggaaaaagcacatcgggaacttagccgggtacgtgatgaacagaaaacattcgggaaaataaaagtaaatacagaattatgaatcagttacacataacattagaagagaattcacctgctattaaatgggctaatacacaagctgacagaataggggcaagaggacatgtcggtactcacttggattgttatacaacagtaccagagaagcctgaatacaatatcacagcaatggttcttgattgtcagaatgaaatgcccaaagaggaagatattaaaagtcttaccacccttgaaaatatggctttactgttacatacagccaatttggagagaaacgaatacggaacggatatgtatttctccacagaaacctttctgagtgaggaagtccttcatactattttggagaagaaaccgctttttattatcatcgattctcatggtatagcggagaaaggaaagagacatatagaatttgacaagatttgtgaagctaatggctgccatgtaatagaaaatgttgatttatcatgcattggcaatcaaaaggaagttcagttgaaaatattaatcaatatcaatcaccaatcaacgggcaaaccctgtgaattgtattgtgtgtagtcctttcccctgcttataactttataaaagcctttggggagcctaatacccctgtatcaaaaatacagggggcaaggtatccctaacgcaagcatgtatatgtaaaatcacatacccattccaaaaccccggcttcttttcctgggctggtcgagttcttcttccagctgcttctttctctgcggtgcctggttgatatctggaacctggaatattatactatttccctattgttggttctcttcacgggctattatttctttttgtccaataatgtttggggtaatatatattttatttgcttttatcagatattcttcgtaattttataaattcaggcagaggttctggtaatagcctattacggaagacgtgcatggctatgggcggttagggtaacttaaccgctttttcttttcaaattttctttgttaatagaaaatttctgtatctttgctttgtcataagacataaataacttcttacactgtcattctcattcatttcttcaattcttgacagtagtaaatcaaagcacattataatttaagtttatagctgcatctgcagcctatctatcgcaccctctccaggctgtgatagatgtttcctcatttattcacttttcattaatcatttaatcaatttcattatggaacaggtattaattggccagaatgccggcattatctggcatctgctcgaaggtaaaaatggtgtagaagtatctctttttaagagggagtccaagctctcagaatctgagttctgggctgctatcggatggttgtctaaggaagacaaactttccttctctacagaaaaagtaggtaagaagacagtgaagacatactctctgaaagactgattcattgtgcgctcatgctgtaggcttgcttgattcctgatggaataggcaagtctttttttttacaataaattttataacacaatacgttcaaattatttaattttgattttgtgacataatcaaaatttactatttttgtcccaaaccacacaaattagcttatatggaaaataaatttgaactagttgaaaaatataatattgatgtggatgtctttattgaagaaaacggtgtaactcctgttggaaaactccctgacaaccatcttaccaaagagttttttcgcctatattttactggacagattacaaaggtctggaagagatggctttctgaatgttggatgcaaactccttaatctacagacctatattagacgggaaccgctatattacagaacaagaattatcaaaagctctcaaaataacaaaaagaacactcattgaatatagaatgaatggtaaattgccctattacagaataggaggaaagattctgtataaggaacaggatattatagaaatattggaaagaaacaaagtattggcatttgaataatatctcttaaaacattaataatcaaaagataaactttataaaatagcttgtagctacccctaaataattatataaatatttggaggaatagaaccgaacacttacctttgtaaagtcaaaggatgattaacgagaatctatcgaaaattggtgaatttggcatatggctgattcagtggttcggggatttttccaaagatattaaagtgctgtaatttaggactttgaatagtattattcgattccttgaggtaaacagtacgctgaactctacatcaaaaggacaagaggattttgtagatttgaaaactatatcaactacttcatattttttaatttcaatatactttgaactctttactctatttaaggaggcaaaagcatgtattgatatagtaacagagattatcaggataaagtaaaatttcagtttcatagacctgtgttcttcataaaaaaatcccgtataggtcctatagaaccatatacggaatatataacccccaaaaaatcatcaattcatattttgtaaatatctattgtcgactattctttcaagctcttttttaagtttagcagccacctcaggattcttgtcaatcacattcactgattcactcctgtcgccattcaacttaaataactgatcctttggactattccccaactctgtattagtctgtacattcaaagcaggagcattatttctaggaataaacttccattcgccatctgttatgccaaggaagttctgaatattctgtgttacaaaatattctttacccttttccgatttacccaaccatgcatcaagaagattctcactgtcaggcgctgcaccatcaggtaaagttacaccagtcattgcagcaaatgaagcaaaccagtccaattgagacataagcaaatcgttaacacctggtttaacgtgatttttccatctcaagatacatggaacacgtgtgccagcctcatagttactgtacttgccacctctcaagtcgcctgcaggcttatggtcgccaagtaattccacagcctgatccttataaccatcatctatcaccggaccgttatcacttgaaaggacgacaattgtattttcgtcaatacctaatctttccagagtcttcataacttcgcctacaccccagtcaaaagacaacaaagcatcaccgcggagaccgtgtccgctttttccgacaaatctttcatgcggatcacgaggtacatgaatatcatttgtagccagatacaggaaccaaggtctatccgaagccgacttttcttcaataaatcttacggcattggcaatgatactgtcctgaatatcctgatctctccataatgcagatttacctcctctcatatatccaatacgtgaaataccgtttacgatactcatatcatgtccgtgagaaggatgaagtcttagcaactctggattgtcttttccggtaggctcgccagggaaattcttggtataactaacctctacgggatcatctggtgataatcctaaagctcttccgttttcaatccaaatacaaggaacacggtcagctgtcgcagccattatatgcgagaattcaaacccgatatcgcttggatttggagaaaccaatccattccagtcctgctgaccagccttatcaccaagaccaagatgccacttaccgatgacacctgtcgaatatcctgcatcaacaaacatatcagccatagtatatatgtttggcttgataatcatagctgcatcacctgccgctatcccggtacctttctttctccacggatactcaccagtgagcattccatatcttgatggtgtacttgtagatgcaccacagtgggcatttgtaaacattataccctcagatgccagtttctccacatttggagtaataatcgattttccgccataacagctcaaatcaccgtaaccgatatcgtcggcataaataaacaatacattaggtttcttattcacttctgcagcgtcttttttccctccgcatgaagacagcactgctgcggcaattgccggataaaaaaataaatcagttctcatatgttttttctatataggtttataaattcgtttcatcatcattaactgtaacctccaaaaatataactcttctgttttctgtaacagttctatctccaacgtaatacatttacctttaagtcttcatacatgcaaactgcgaaatatgcccgatgccataaggtatcagcttacggcacttttctaagcttaacttaccattctcaacaattaatataggtcttataccatgaatttgcgcagtaggttcatcaggagataataaattatagacagaatcaacaatggtacgaatgctatcatctacaaaacaagtcctattttcgaaaggaatattaatatcttcatcttcagacgatttctccgaacacgaaaaaataaattggtagaaaaaataaaagtttattcataattagttttaagtttttatatgaacacaaaaatataattaacctaccagactagtcgtagatatttctttcgaaattagggggtatttttattttattctatccctttttaagataatctccttctgctttttagtcaatccccttcgatataactcttccaaagaaaaaggaacatcattctttttcatttccggatcattgaaatcaatactcaaatcacagtcgaaccgcaataaaatacttcttctgtttcgaccccacaaattataatgggaaataccccatgttatgccattagcaaacggtacatccgtaaaggcatccgggtcataaagtcctgaagcaattggcatcatggcacaaatacttgcaaccttgaaattcttgccatcctctgaatattgaatagtattattttcatgcccgtctttagccataatcgaggctatcccctgcttgaaacggaaaaactgagtctcatgyccggaactgataatcggkttcaattcatwttttttgaatggycccatagrattatcagytakggnnaagmccckgagrgvgratnnaaaccgccattatcctttccgttataatccgatttataatatagatatattttccctttataaaccaatggttgagggtcatgaatagaaaattgatcccaatcaccgggttcaccgtttggaataatgatttcatttacgggagtccatggtccgtcaggcgaatcggcatacgacattgcaactgggcagtcatcacgaccggtacttccgctcattacagaaaaggcctgataatataaataatacttgcctttccagaccaatacatccggagttgcaaccgacctccacccaagttccggtttcttcgggcgatgtacagctatcccctgttcttcccaatgaaaaccatctttacttgtggcatatgcaatatcacacaagtcccaatccacagacggaatagtatcattagcaagctttgtccctacaaaggttgttggagtgcaacgcttggtgtaccacatatagtatttaccgtttaccttaataattcttgaagggtctcttcgtgttactgtcccatcatcattatgatagtcaaagcctgtaagcggtgagtacttgaagttcgtgtataattcattcaactgtggagttgcagctccgtaattatcatacactctgttcatagcgcaactcatcttgaaagttggcttttctttaggcataacataagggaatggattctgtgcaaacaagtctgcagaaactcctatcaatactgatactaaaagctttactctcatactataaaaatattaataaaaaaatcaattacgaatatattgataaattaccaaacctaacataggtaaatttaaagtagatagtatgtattttaaaattaaagatttttttctctttatcttagactagaagtattcagtctacatacatagtattgatactatcatcaagaagatcattcttttcacacaatccgccggtccaggtctcatcagcagtccacaaatcccatatgatattcagttctagagtaaaatcctgttttgataccacatttcctgtaggttcaccattcaagtaaaattgaatattgttggcatctttccaccacactccaattctttggaacttttcattccatttcactccttttgccggatttccgtcagagagtttcctgttatcgaagttaccgttatttctttctgtaacaccattcttgacaacaaagtattgcgaatacatagtataaggacgtgtattctcctgtgccttaatagaaggttttgagttatgctcacacatgtctatctcatccctgtcattattgttgccattattcatccagaaagtactgaaagccgaaatatgtgcggtacgcatataacattctgtgtacatcggatatgaaattctcgtattcgacataaccctagaagtcttaaaccacctttccttgccatcgtcaagtgtagccttgatccaaagcaaaccgttatctactcccgagttctcggcaaccatctgtaccggtacgtcataattccataatgacctgtgccattttgtagcatcccagtaatcaaactcatccgaaaggctttccaccttttcccatttaaaaccttccggaacctccggaaggttttgcgcattacaaacaaaatttgctgaaaacatcagcgacaaaaatgatagtaaggtcttcatcatatmcctctaatattatttraaaaattaaaaatctgcatagtamctgtacttvcgtgaccgccattatctgggaactttaacgagatagtattatttcccttaagaatgctgtagtccacaggcacttcaataacaccgaagaaagaagcacggtctttctgaacgtcacccctgaaattatccgggatatcaactttcttaccgtttactaaaagttcaggcagcaacgacaaaccatgatttctgccaagtccaagacggataacggcctcaccatattcggtcttcttgacattatttatattgaaaaccagttctttgccagcagcaatctctttaaggtaatccgttgcataatatttcacctcctccatcgtttcgtttattttcacttttctgtcgaaattatagcaaatgacgcatgttgcctcagtttctaaagtaaagtggtcaagactctttgcatcgtatacatcaagcataggtactccgtctttcccacctttaaggtacagatgtctgacttctatactttttgcatccttagatgttccgtttacagaaagattcaaatctactggtttgaaatccagattgtttataatgaaatacacattcttcccgtctacatatgcatcacacataatgtcaggattatcacagtttgtttcaacccttgtacccttcacatccttccagagctgataaaactttataagttcagagtaaacatattctccggtaaagctttcaggctcgttttctcttctcagcattctcgctgtatgtgcaagacccgttttgggattatatccccactcagatttgagcatggcaaaaggcatggcataacatatattatcggtcctttccataaactgcataagcatcgagttggtcgatttcagtcgcagccagtcgcgatatggcgaccatggcttcctgttgtaatcatgcgtctgcgcactgtattccgaaatcataagaggtttaacctcaccaagctttatcatactgtactgctcaatcatatccattgtggcctccatgttactgccttttctgtacatctgtttaccatctttacatggaaaatcgtataaatgaatagtaaagaaatccatatcctttccggcaatatcaataaactgtttccatctggcattccatcttccgaaattctggagttcaaaatcagggaaggcagtgcaataacctcccactttcatatcaggattaaactttttcacctgtgcggcaatagtagagtggaattcaaataatttggttatacttgactttggagctttcggcttatcataaatatcccacaaaggctcattaattmcctcacagamcccaggcttaggttcmccmcttntcyccycctycacmaaaatmctcctnnaatatnncctgccataaaattcacccgaagctgttccgaaaggctcatcttcagtatccttctgcgataaagcccatcctttcagcgttttagttccgtcaggataaaaaggagagaactgattacaaagaatcagattactgtatttctcgtaaggatgtacctttgtgttctgaacataccgtttcttattctggctacatagtctagccaaatcatctgggtcggcaaaacctggtctttcgggatcctccttaacattgcgaagcacagtcttgatcatacctgtttcacgccccacatacacatcatattttcttataaggtcatcacgtaaatcagcaatcttatttgcactatcccaataattctcatttattgtagcatggaaatttataaacttaggacggttaaactctgttacatccccaagcttatgttttacattcaaattcaattgcacatgagtctgtgcagaagcggctaaatgaacagccataaaacaaaacaagccgataattctgtttttcataaattattttatattaaagtacaatattagtaaagtttatggttttgagaataaaaaaatgctccgttattgaatatcatctaacggaacattttatttgaagcaaagaacttttatcttgatggttcaatcaatatgtctttttccattatactgatattatcatactttttaaccagaataccattttcatcatattcagaatttttcagtcggatattgtatggcaaatatatatcatacaaatagtatttatatatggcaaaatgcaacttttccctaagtaaatgaaaatctctcccataaagatattttttctccactataactagaataaatcaaatccttaactatataaaaagagaagagaccatctcaaaatcattttgagatggtctccataaaataattatttatcctctaccggtttataaattcttatccagtcaacaaggaatgtattattatctttattcattaattctttgtttgtcggagacaatccacttatagctctccagctctggtcttccatgtttataattatatccatttctttcgatagtccggtacccttagtaaaatcattggggtcaataatatttttcccagatacccttcttaccattttaccatcaacataatattccaaattaaatggatctttccagtaaactcctactctatggaaatcatttctccaaatagttccattcacatctttataccaacttccaggatctgttggttgatagtcctgaaacggatctctaataaacacatgatgacttaaatgaattctatcaggtccgtaaaatttatgtccatcatcacctacaaccctatcgctaccatatgcctctataatatcaatttcttgagtatcatcaggacttaacatccatacatccgaagccattgttgagttagctatcttggcatatgcctctacatacacaggatatactactctagttttagatgtaacacaccctgtataagtgccaggcatcattttttctttatctccgcttgtaaccttaactatttttacatcgtcaggtctactggtttcaattcgcaaacaaccatctgagacagaaatatgatctctctgccatattgtaggagctggtcctgaccagttggcatggtaataatcggtccatttcttttcaaaattacctttgttattactgtcagcagtatagttaaagtcatccgactgactctgtaattcccatttcattccagtacctgccgaaactggtacaggaaacttgtcccattcatattcaaattctgtttcagaatcacccgggtctgtatttgatccgttttctgacccattctcttctccattattatctcctggcatacaggaactacaagaaataaataaaaatcctaatgataaaagcaataatttcaattccattctacaaaaaatttaattaataatatctaagaaatagatagggagctaaccctatctatttttaatttactatggacgtttttctattttagtcaatgaaatatcatcaaaatagaaattcaatgctgatgatgatttttcatttgtagctctaatgataattcctgaatctccagctttggaagatgacattttacatgtaacattcacccattgacctttaacaaaatcattattaaaccatacaccagtactccattttgtatctattgcaaaatcaaaagtaatatttggatatattccatttactggagtaccatctaattcttgtacatttatccacatagaaagcaaataatcaacatttgcttctacagggatggcataatctcctgctactttggtatcgcaacccattatcattcctttaccagcagaaatttctgcatatgcaacaccgttaccagaatgagcattatcatttaccatagataatttatagtcgtcccatagagttgctccccaagaaactttatcccaatcttctacagtacaattttcaaaacctacatcatatcctgcttctttcaaaagatttgacatcttgaaatcgaaactttccggttctgaaataaaatttgtagcataaacatagtcaagtgttatcaaattaccaacagatgcatcgtatgaaacagttatattatcggtattataaatatcagtatctaatacaagttttacaatattgacatccgtacttactgattgaatatttgcaactacaggaatcatattttccccgttggttatattcagtgaaaaagcattaacaggacagtctgatgcatctttcattgcacggctaaatttcaaacctatagtattggatgataatctttcagcaccaataaaatcaacaggatcttccgaagctataacatttaccaactctgtatattttatgctgctacgtccaaaatcacttgatgactccaaggtaacctcatacaaccccggtgagtagaactgataagatgcaataccgtcaactgcctcaactgtttttgcctttccatcttcactaacaaaagtgaagacatttttattaggtgcacctgtagaagtaacagtaaaatctatgtgatgaccaccttgcagctcattcttggcgcccgaagctaaatttatttcagcaccagtttctctacacaaagcggtaaatgacgctctaacactatctaaaaccgtaacttcaacaaactgttccttttcattagtaagtccatcctctgtttctatttccttacagaatatttgtttaagagaaatcttatgaactccaggaacaataaaactaactttcaggttttcggatgctgaggttgtaacttccgtagaatctaaattaatggctacaccttcagggaaagtccatgttctggattcaacacctcttgacaaatccagaaatgacatccaaccattaacttgcatcaaattcgctttatttccaaaagaagtagtaacatactcctggactatatcttcgttaaactcatagtccttttggcaacttattcctaaaaaggctaaaataactaataatattttatttattgtcttcatcgtattaaaatttaattctgtaatgctttattattctgaacttcacagctaggtattgggaaataatcgtgaacatccgactgatatacctttgaacgcatctcaaaatcaggacgcacacgttccttaacatttaatggtggaatctgttctgtagaacttattgttgtacttgtaatagacccacataaattcaaacgtataccttgttcttcactccaacattgttcgaagcactctttaaccaatccccaacgaaccaagtcaagccagcgatgaccttcaaaagccaattcaagcaaacgctcagccattcttaaatgcatcaatacattatccttattggcaggaatcatctcaaagtctgtgtaattatttgcaaatttagagacccacaatttagggaaaaatccattattctctgttatataatccttaagttttactacccctgcacgttctcttactttatcaatatattctattgccaaatctacatcaccatcatcttcaagaatagcttcggcatacattaacaaaacgtcagcatatctaatagctctgtaatttatacctgttctacatcctgtagtaggatcctcagattccactctatcccaacgtgtccatttccttactttagaactctgaccatatccaaagtttacttttcctttggcaacaagatttccatcagcatcatattcatcaacaagaggagccttataataatcaccgtcacctttctcaactacaattgttgcgtatgttctcatagagttcaaatgtccagcttttgtccattcagcatcaggatccataacatctgccgaaacaaacatttcgtggcaatggtaggtaggtaacactgtattgtaaccacctgcaaaaagagaagcaaactggtttgcaatagatacaccttccgaaccatctatctcgtcatgcaggtttccactatttcctggcttgtagttatcggagaaagagacttcaaatacagattccttattaaactcattatcagtggtaaagttatccatataattttcttccagttcatataagttgctttcaactaattgcttaaagcattctcttgccaacttccattctttctggaaaagataagtcttacccaacatagctgtagccgcaccccaagtgatatgtccgtcattaccgttgggccatactttaggtaatatttgagcagcctgaaaatccggaataaccattttatttattacatcatcctttgatgaaaaaggaatgttcatttcttctgccgaagaagccattttatcatgtattacggctccaccataagtattggcaaggaaaaaatagtcatatcctctaataaaacgtgcctgagctattatctgttctttcttctcttgtgtaaggaaatctgcattttcaatgtaatgtaatatttgatttgctctgaaaatacctacgtacaattgtgaccaacggttttcaacatatggtgaagagctatcccactttaactgggtgaagatattttgagtactataccatgtttctgtacctgccaaatcacttcttagcatttcgaaagtcaatcctgaaccacttacatattccaactgcaaagaaccatacaatgcatttacagccttatcaaagtcagcttcggttttccaaaacgagccatcagtcagagaattgggattaacttgtgacagcaaggcatcttcacaactcgtaaaagttcccccaataagagagaaacataatatataagctaatttctttatcatagttttaaaaatttcagttaatcaaattaaaaatcaagctgtacaccaaataagaattttcttgttataggatagttggctttatcaacacctcggcttgcaacaccatctccaccaacttcaggatcatatccctcatatttagtaaatgtaaacggattttgtgcagttacatatattcttgcataatccaaaatacctttaaaccactttctaggtaaagaatagcccaatgttatattgcgtaatcttaagaatgttccatcttccagaaagtaatctaatctaggattacaattatatggttcaggtacaggtatatctgagttgatattgtttggagtccacatatcatataattcaacgtgtcttactcctgcgtatgcaaactgttttgcaccgttgtataccatatttttatgtgaataatatagctgagtagaaaaatcaaaacctttataatcagcattaaaagttaaacccatttcaaatttaggcatactgcttcccttataaacacgatccttatcatcaattatattatcaccattctggtttaccagtttcaagtctcccaattttgcatttggcatataagacttaacagcatccagttcttcctgagtctgtattactccatctgattcaattaagaaaaatgaaccagcaggataaccaactttcatatatgttgtaacattatcattattcaaccaggaaccaagtttactattagccaaaggtatttcattcatatcacccaacgaagtaatttcattgatatttttagtgaatgtccctatcaatgaccagttcatgccaaattttgtatgtcctttgtatgtagccgagaactcaaaacccttatttaccatgtttccgatattagaagtaattgagttatttccccaacctacatttgtaccagatgatgcaggaataatcacatcaagcaacatatccttcttattattcttatacatatcaaaactcaagcttaaagctcctcttaataacgaagcatcaagaccgatattctttgatacatttgtttcccatactatgttaggattggaatacgctctctgtatagcacccagacctaactgatcgcctgtttccggtccccaaacataatcaatctggttgcggatgtaagatgcatatttatagtcaccaataccttcattaccaacctcaccataactggctctcaatttaagattgctcaaccaatctacatttttcaagaacttttcttcattaatattccaacccaatgaaacaccagggaagaaagcatatctgttattcttagccattcttgaagaaccgtcgtaacgtccactggcagataacatataacgaccgtcataagcatattgtaaacggaacaactttcctacaattacatgagtagatttagatcctccaattgatgtaagaacatttcctgcatcgaaaacaggtgtatcattactaatgaaatcttttttagacattgcgctctgcacccagtctgtcttttcaatagtataaccgattacagcacctactttgtgctttccgaatgttttatcataacttaatacattttccatagtaagtttcatgcttgaattatcctcctgcaaaagacttgcatcaactctacttgaagctgtgttaaggttcccgtttttatcataaaccataaactgaggttcaaagaaatctcttttatattgccaatagttataacctaaattcacctgataagtaagaccgtcaataatctctatcttaaagtttgctgctatattatgagaattttcaactctgtcatcagaattagtcaatatacgagccaaatatcccaaatgttctacgttgttatcagcatcaatttctacttcacttccatcttccatattcaatggtttcatatatggtttctgatattgtgcaaactgatatacattccaaggctcaacagatttatcagaatgatttaagccaatacttacaaatccactgaaacgacctttcttaaatgttgcatttgcacgggtagagaatctttcgtaaccggaattaataagaataccatcctgtttgaaatagttggcattaacattataagtcataacatcactaccgccacttacagtcaagttataattttgcattggggcattatctaaagttactgatccaataaaatcggtattataatccattgcatcgggattataatataagtcggaagagttaccacctaaagcacgctgatacatttcatcaacatacaactgctgtggtgtactaagcaatggagttcctgatacaatgttctgtagaccataataaccagagaaacttacttttgctttacctgctttaccgcgttttgtcgtaatcaatataacaccatttgaagcacgtgttccgtatactgcagccgaagcaccatccttcaacacatctattgtttcaatttcttccgcaggtaaattaggattaccgtcagccggtattccatctacgacataaagaggacttgaattaccattaatagaacccaatccacgaatttgaataacagcgccatctccaggacgaccggaactttcagtaatattcaaacctgaaatcttaccttgcaaagtttttgtaaaatccgaacctgctatttttagcatttcatcagactttatctgcgaaacagcacctgttaattcttttttcttctgtacaccatagccaatagctacaacctcagcaagcataacagattcttcttttaaagaaacattaatttgtgtttttccattaacagagatttcttgtgtttcatagcctatgaaactgaatacgagagtcgacttactatcagcctccaaaaaataattaccatcaaggtcagtaattgtccctgcggtattatcacctttaacagaaactgtagcacctattataggatctttcatttcgtctgtaacttttccactaatagtaatcttttgtgcactaattgcagatacacaaaacagaagcattaccaataaaggtaacctctcccactttttgtttttgatttccataaattgattttttagcaaacaataaattaatttttttgcaaagaaagtgatagttggtgttttatatatattggaaaagagtttttaatatggtgtatttgcatacaatggcattttttttataaaagttctcatctacaatataagcaattatagacatttaattttacaagtgcaaatatacagctgatggtagatcagattgagtttcaccctggatatacacaagtggatacagtactttattgccagagaaataatattacagtaaagcatggagtccgcttggaaacggatatatgctgcagtatcctgttctatgtgaaatagcatcaagatacaataaatcggtggctcagctatgtttgagatgggtactacagaacaacgttgttccactgccaaaatctctgaacaaagaaagaataattcagaatgccgatgtatttaatttcgaacttacatctgaagatatgaatttaataacgaatatggaaacatgcgggttctccggctactacatagacgaaaatatggaataatacgtttaaacataaacttcccctaaaaaattaaaagtattttataggagaagtactcaaataccatacttttttttcaaaaaaccactgattagttttttttaatggtaatacctttgccaataaagaaaaggattgtttgagcaagtggtatacataattaaggtagattgttttcaagagataacaaacagaattatttaatggttgttgcattgcagcaaccatttattatttaattattaacaaatggcgttttatgaaaacatctgaaattctaaaagcaactctcttacttgttccggcaattgcatgggcagaaggaaacaacgaacaaaaaaaaaacaaacattgtgtttattctctcagatgatgccggatatgctgatttcggttttcagggaagcaaacagtttgaaactcccaatcttgacaagctggcggaaaacggaatgatactccaccagatgtataccaccgatgcggtgagcggaccatcaagggcaggacttatgaccggacgctaccagcagagattcggtatcgaagagaacaatgtagtgggatacatgagcaagcacggtaaatacggacttgacatgggtgttcctacttcagaaaagtttatatcaaactatcttagcgaagctggttatgtttgtggagcattcggaaaatggcatctgggagctacagacgaatatcatccttacagaagaggttttgaccaatttgtgggattccgttcgggaggtagaaattattatccttatcagaatgaagaagagtcctttgccgatgagggtgtggaaaacagacttgaatacggattcgctcatttcaaggaaccggataagtatatgacttacctgctcgccgacgaagcctgcaagttcattgaggaaaatgcaaaaaaacctttctttgtttatctggcattcaacgctgtacatgctccgctacaggctgaaaaggaagacctggcgaaatttgctcacctgaaaggtaaaagaaaaagtcttgctgccatggcatgggcaatggacaaggcttgcggacaggtgttcgacaagcttaaagaactgggacttgacaaaaatacaatcatagtgtttactaacgataacggtggacctaacggaactgaaacttccaactatcctctgagcggtatgaaagctaccttccttgagggtggtgtaagagttcctgccataatttcttatcctggtgtgataaagaaaggtagccactacaacaagcctacaagcttcctcgatttcttgcctgctttcatcaatcttgcaggttacgacaaggaaattgcaaatccgctggatggtgtagacattattccctatcttactggcaaaaataacggtcgtcctcaccagactctttactggaaaattgaaaacagaggcgttgtgagagacggcgactggaagttcatgcgtttccctgacagaccagcagaactatacgatataagtaaggatgaaggcgaacagaataatctggccgacaaacatcctgacttgataagaaaatattataagatgttgtcagactgggaaatgacactagacagacctatgtggatgctggaaagaaaatacgaaaagcgcgtgcttgaacagttctatgagcaggaagaatacagacgtcctaaagaatataaataatagacaaataagttataagactgagcgaaggaacggattcttaatgtcaaggctaaacaaacaagtaactttagccttgacacttactttattaaaacaaaagagataagtaagtgatctaaaatatttttatattcaacataaaatattaatattgtatcatgatattttagaatgtaaatcatgaaacatataaaagtgcttgaattaagtgaggctaatcgcctcgaattggagaaaggctatcataatggccctactcataactatcgtatcagatgcaaatccatattgttgaagtcatcaggaaaatcagcttcagaaatagctgaaatattcgatgtgacaataccaacagtatacgcttggataaaacgttataaagaaaatggtatcaaaggcttaaaaacacgtcccggccaaggtcgtaaacctataatggattgttccgatgaggaagcagtccgtaaggctatagaggaagaccgtcagagcgtgtcaaaagcacgcgaagcctgggaaaaggcttccggtaaaaaagccagcgacattaccttcaaacgttttttaggagcattggtgcaagatataagcgaataagaaaacgcccaaggggtaccccctcaccgcaactctattcatacaagaaagagaagttgcaagaacttgaaagccttgattccaaaggttaaatagaactttaacctgttggcggaattaaaatagcgcatatttaactctgccaataggcttttcatttttgtagttaatatattgaaggattgtaagtgcgctaatcttcccaataatccgggcaaacaatccatctgtatctttcgcataattccttataatcataaactggtcacacaattgcgagaatagggtttcaattctttttctcgctttggcaaaagccggaaatgttggcttccattctttttgattacatctgtatggtacctccaatctgatattggcagtttcaaacaaatccaattgcgcttgggcacttatatatcctctgtcccctatgactgtacaattactataatccactttcacatccttcaggtaatgaatgtcatgcacacttgccttagtgaggtcaaaggaatggatgataccacttaacccgcagactgcatggagtttatacccataataatacatgctttgtgatgcgcagtatcctaccccaggtgcttttctaaaatccttctttcccatactgcaacgtttggaacgggcaatacgacatacttctatcggtttcgaatcaatacagaaatagtcttcaccaccatccattttagaaaccattctttctcggattgcattacatagggaggaagttattttacgcctgtcattgtattgtcggcgggaaataaggttgggtatttcaaccctatattcctgtagctttgcaaacaacagcgactcactgtcaataccaacagcctctgatgccatgttcaaagccactacttcaaggtctgagaatttagggacgactcctcgtcttggtacattcccggattcattgactaaattgccggcaatttgcttgcatatgttcagtaattttgcgaatattgcatataagttgtgcatacgatatttgtctattaaaagtttagtcacctttaatttactaaatatcaacaatatgcacaactttttaaacataaatcttttataatttaattccgccaacaggtaactttattatgctgatgaaagtcatgtatgtaccgatggttatgtaccttacgaatggcagttcaaagatgagaatgtatatattccatccgagaaagctgcaagacttaatatctttggaatgattaccagaagaaatcaatataaaggctttacaacacaagaatccatcaatgcagacaggcttgtggattatcttgacaggttctcttttgaggtaaagaagaaaacggtggttgtacttgataatgcttctgtccataggaaccgaaagataaaggaaataagaaagatatgggaggatagaggattattccttttctatcttccaccatactctccggaacttaatccagccgagacactatggcgtatattgaaaggcaaatggataagacctgctgattacaatactaaggactcgcttttctattgtacaaacagagctcttgcatctgtagggacgaacttatttgtgaattactcatatgtataaaattaattttgaatagttacttatgaaaaaattttgtttattcttttgcataatatttacttgtataattaaggttttcccgcaatatgtaataaatggcgaagagtatgaattccgtaccaggaatttgcctcaaagtgaagtcaatgatctaattcaggataagtatggttttatctggatagcaacacttgatggtctgtacagatatgacggttatgaatataaggcatatttgagtgacgggcaggaaggggctataagtacaaatatgattctgagtctggatattgacagctataataatctgtgggttggtacttatggacgcggattgtcacgttttgactacgaaacaggtgaatttataaattttcccattgagatacttataaacagaaaagatttaaaggggggggacattacagcggtaatggttgactcgcagaatgatatatggataggaatgaattatggtttgttaaagattaaattcgaccataaggaaaatattataacagaaagacatttttttgagttcgagggaaatgcttccagtgacgcaataaaggatatatatcaggatgtatatggtaatatttggattgctaggaatgcatatactgaactggtgacaggtataaaggacgataagctggtttcaaataaaatttacatctcaggcaatatcataactggtgataagagtgctattcttgtaggtggatctaaactgtttaaaatagaacctcatgacggtacttttgataacattactcctgtcctgctatacgataaacctgtatctgcactaataaaagattttgataatatttgggtggcaaatagaaggggtttggaatatctttcccaatcagaggataatgaaaattattcaactcaattcagtcttaataaggagtttgtcaaatctttgaatagcaataatgtgtcatgcttgatgactgactctgaaaacaatatatggattggaatcagaggtggaggactatactcactaaacaagaaagcacataagtttcagaattatatacccaaaggttttcataaagatccttccggtagaaaacagaagagtgaatgtatgcaggttcgtgcggtttttgaggactccgacggtaatttgtggttaggtgaagaagaagaaggggtgttcaggctctctgcagataaaaattataatgatttgtttcaagttgtaaatgtcaattcaaaatatgagaatagaggttatgcttttgaagaaacaaaactcaaaaatggtcgtaaactgatatgggtaggaacaagttttccggcaaatcttgttgcaatagataacaaaactgccgatattgtaaattactcttgtccttcatcacttaaaatgggcttcgtgttctcaatagaaaaaacttcggaaaatgttttgtggattgccacttacagtaatggagttttcagattacagcttgataacaatggaaatgttgtggattacagacatttcactatatataattctgatttatcttcgaatataatccgttctttgtattttgataataaatctaaaatatggataggtactgacagtggattgaattttattgatatcaatgatgaaaatctgaaagtaaaccgtataacattcagtggggatagtgactggttcaatcatctttatgttcttgatataaaggaatataatggaaaactgctgatgggctcaatgggtaatggattaatattatacgactatattaataacagttgcacaaaactgactacaaagaacgggctgcacaataattccattaaaactgtgctgacagatcaggataataatgtatgggtatcgagcaacaaaggtatttccagagtcaatctaacagataacagcattatccattatggaaaagataatggcatatccgaagaagaattcagtgaaatatgtggtgttaaacgtcataacggtgaacttgtatttggaagcagaaggggaattcttgtgttcaggggtaatgaaatagtgaaaaatgagagaaagccaaaagtctttataacagacatgctgactaatggtacatcattaaaatttaattccgagcacagtgagctggtactggattatgatgacaggaatgtagcgttcagatttaccggactacagttgtccaatccaggaggattaaagtattactataagcttgaaggttttgacaacgaatggcagctaactaacagtactcagagaactgcaagatacaccaacttgcctgagggcgattatatatttattgtaaaagccagtaatgaagatggttttgttagcgaacatccagcccaattgagtttcaccgtaaagccaccatttgtacgtagcggactggcatactttatttatttcttactgtttgtcgtccttatgtatatatcttatttgatattaaaagctttctatagaaagaaaaaagaagtacttgcagcaaatcttgaggctaagcaggctgaagaaattacacaatacaagcttcagttctttacggacgtgtcgcatgagttcaggacacctctcactctcattgagatacctttggagtcggcaatcaataattgtggatctgacaagaaacaactttattatttgaccctcatacgccaaaatgtttccacattgaaaattcttataaatcagttgttggatttcagaaaaatagaacgtgggaagctacagtttaatccgtatccggttaatgtgtcagatgtggttggagatatttattcgaggtttaagtgtctctcagagagcaggaatataatatattctataaatactcctgaagaagctgcagtttcgatgatagatatttctttatttgagaaagtaattgcaaatgtaatttcaaatgcattcaaatataccccacaaggaggaagtataagtgtatatgtagcgaatgatgccaataccataacagtgtctgtacaggacacaggtgaaggtatttctgaggaagaactgtcgcatctgtttgagagattctatcaaggcaaggagcataataaactcaagcaggctggtacgggtatcggtctgtctatgtgtaagaatattattgatgttcatggaggaaatatcgaaattttcagtaaatcgggtgaaggaacaaaatgtaatattatactgaagagagaacttacagaacatgtgacattgagtgagattccatattatgatatattaaggaaagacactctatcgcttattgacgacgaattatcgtctatggatttttcgaataatgaagttaaacaggagactaaccagtcggaggattcagaacttcataaactgactttactgattgtagaggataatgaccagatgagaaatgtggttgccgagaatctttcttccgattttgaagtcattactgctggaaacggaaaggaaggtcttgaaaaatgtaaggagttttatcctaatctgataattacagatatacgcatgccgataatgaatggtattgacatgtgtattgagataaagaaagatgaggagataagccatattccgattatagtactaacagctaataattctgtcaagaacagactggacagttataatctggctaatgttgattcatatcttgaaaaaccttttgaaatgtccactttgcgtggggtaataaaaagtatattggccaatagagccagattgcaggagcaatactcaaaaaatgctattatatctcctgaaaaggttgccagtacaaagactgacctcaattttatgaccgagattattaatattattaaaagggaaatgagtaatccggagttaagtgtagaactgattgccgatgagtatggtgtttcgcgaacatatttaaacaggaaaatcaaggctattacaggagacacaactttgaaatttatacgtaatataagattcaaatatgcggctcagttacttcagtctggcgagaagaatgtctccgagactgcgtgggagattggttataatgatgtcaatactttcagacttaggtttaaggaaatgtttggtgtaactcctacatcatatttaaaaggaaaatcagaggatgagagaccgtaattcaaactgtgtcaatcctaaacaagcctgattatctcaaattttactttcggataaacacctgaaaatcagatgtattcgaagtaatatttaactaaataaatgacaagttaaagggttgacacagctctatttacgtagcctacgtagcctctatttctaaataaaatcttataataccctgaaatattagttctttaaagcattgtcaataatagcttttattttaggatatttttcgtcagtatcgccaactttttctctaagtttagccagacgcactttcatatctttcagaacatctttatattcgggatcatttgctacgtttttcatttccataggatcctttttcaagtcatagagttcgaaagcaaccggagtttgtaccaccttatgactgcctttatctcttaaccaccacattgaaggagtgcccattgtcttttcgtcataatgtcttccgtagaacaatatcagtttataatcttttgttcttataccaatatgtgcaggaatatcatggtgaatcatgtgcatccagtatctgtagtaaacctcatctttccagtttgcaggagttttaccttcaaatacatcagcaaagctttttccgtccatatattctggagccttaccgcctgccagttcaatcagagtaggagcaaagtctatattatttatcattaaatcgttatgtacacctctttgcttagattttggatctctcacaataaaaggcattctcattgattcatcatacatccatcttttgtcctgcaagtcatgttcaccaagcatcataccctgatcccctgtataaacaataatggtattttcccaaagtccctcttttttcaggtagtcaaacagccttttcaagttgtcgtccacaccttttacacatctcagataatctttcaggtatctttggtacgcttcgtatgtatcctttttaggatcacctgtatttattttatagtcttctgcgtagcttctgttctcatgtcttcttgaaatagaagtaccgatgaagtgtctcagagagtcatttttccctcttgtagcctcagaaccccatccatcctgattataaagcgattccggtaccggaacttctgtatcttcgagataatatttatatcgtggagcatactcaaacatgtcgtgaggagctttatagtgatgcatcaggaagaaaggtttgttcttgtcacgtctgtttttcagccagtcaatagttatatttgtaataacatccgaagaatatccatttgtctttacctgatttttaggccattctttgttacttatttcatttgtaagaaatgtgggattaaaatattcaccctgtcctccatgaccgttaagaactttgtaataatcaaagtttgcaggttcgtttttcagatgccatttacccaccatggcagtctgatatcccattttgctgaattccttcacaagatattgtctgtctacatcaagtttttcgtcaagtgtaagaacttcgttatggtgagagtattgtccggtcattatgcatgcacggctaggagtgctgatagagttcgtacagaaacaattatcgaatactactccgtcactggccagttcatcaatattaggagtaggattaagttttgccagatggcttccgtaagctccaatagcttgcgaagtgtggtcatctgacatgatgaatatcacgttcatcggtttttcctgagccatactgcacacagtgggtacaactgcaataactgttgccaagctgctgttaaaattaaattttaccatggtatgttaattttttattttatgataaacttgtttttctgttgtaataccctaaatatgtatcgttcatatttcgttatatttaaaggcttataaagttttcaaaatatatgaatctgtctgataagccttatttatatctgtttcattttccggtaacaggtatgctactatataatacactttatctttttcatattctacactatattcaagattgaagctggcatatcctgcaaagagtttcctcgaatttctacaaatttcttttttgtctttattatatattattactaccgcattacaattatagtcggctgtatatatcagttccgtgctatatttgttttctttatttttgagtattctattctccttattagttatatttatgttattgccaaacactttattttggctttcttcagtttctacatttatatctataagagtataagccctaacccagtcataatatgttttattcattgtttcatcagcaagttcctcatcgctagggagctctatccatggatatgggtatgtttccactaccatgtttacgcccataggttcagtaaaataaaatggatcgttagtgtctctattatagaattccacacttcctgattgagtgttgtttagatagaaagtggctgaacttttgtctttccaccaacaaccatacacattgaaatcgtccgatggtacacctccatcctctctgtatagccttgtttctttagctctgatgtctttctgtacattttctccctctggagtaaaccaataatgaacatttgagttcattcctttataaaagaaatttccgttgaaatcaccagtcctgcctatacattcacaaatgtcaagttcttgtttaaacattcccggtgcagctccttcaggttgttttccgtcggtaggaaattttccacttctgtttgaaagccaaaacgttgatgagagtgtcgttttatttgctttgaatctgcattcataatagccatagtgagccttttcttctttagatactacagctgcacatgaaatgttgaattcagtaccattaacaactatcggattgttcatttttataccctcaagtaccatacatccgtctttaaatgaaactctttcctcttcaaatagaccgggttcacgacctttccatgtagggtgtggatttatccattttgactcatccaattcactggcattgaaatcatcagtaaacatatcatttacaatccatctttgcccagtagggggtaaagggattgtttttattttttcacttacagggaaagtattttcgggaaattcttctgtattattattgtctgcaccttcctgattattgacagattcttcttgacctgtttctataataacttcattgcagtttgcgaatgttattgcacacaatattaatatgtttgtaaggctaattctttttttcataattaccaatttaaatttacaacagtagcagaactaaatctgctgccgttgtaaatgattataaaaagtattactttgcttggtttttcatttataataaatttatacgaaaatagcttgtcgaatatcttatttgtgatattgtcgtggtttacttaaactcacgtaatttttaatacaaagcaaatttataacttccgaattgatggaatagtaggtgttttgaaattaaagagtgggtattttcgttttttcagatagaatcttggttttcaaggtatccagattgtacaaatagtcagatgcttgttggtaattaaagcacctgaccataaaaatgatgtttttagttcttataaacaatattattgtctgctttcagaacatatttttttgttttctcagtgtcaatattatgtatgaaggtttcttctgttaatgcagcactattcagtgtaacagttctggttttactgtcattacccgcagtgcttaccaaatccacttctacagttttatcaccatggttcatgattcttatagtagacactagtttgtcaactgttttgtctgtaactggttttgctatcacagtaccattgagttcaattctaagaacatgggcatattctgtaggtttctgtttcgggaatttcactttcagacctatatctgtaagtttgaattcaagcttttcttctgatccgagcatacttacagattttatctccacattctctatataatcttttgcaaacgatttgataagaacttcatcatcccatgcaagtgatattgcatatactttattatcacgagttgtaaaacgaatgtcttgagctgtgtattcggttttttcattatctgtcatataaccggcagttcccttgttttctccttcgcctggagtaacccatggacgagagcaatagattgcttcaccattaactttaagccattttcctatctctttaagaacattcttttgttcgtctgtaatagttccgtcaacttttggtcctacgttaagcaataggttaccattcttgctgactatatccacaaagtcatcgataatatggtctggagttttgttctcctcatcaggacagtagctccatgattttttacctattgatgtatcggtttgccatgagtgtttacgtattctgtcacttttaccacgttcgatatcgaatacctggatattatcaccatagccgaatttggtatttacaacaacttccttaccccagtcaagcgcattattgtaataataggccatgaatttatagaaagtaggctggaacggatattttcctacagtccagtcaaaccatatcagttcaggctgatattggtcaatcagttcgtaggtatgcaagaggaattcacgtcttgacttttcgttagaaccttcatatttaccgtagtaaggagtcatacctttaccttcaggctggtgcagacgttcgccgtaaagagaaatactcatatcctgaacatcggatggtgtgtccattccatattcataaaaccaagcattctcgcatctgtgcgatgataacccgaaatgaagtccttctgctatgattgccttttttagttcgccaataacatccctcttaggacccatatctaccgagttccacttattgaaggtactattgtacatagcaaaaccatcgtgatgttcggctacaggtaccacatactgcgctcctgattccttgaaaagctctgcccattcctgtggattgaagttctcggctttaaacataggaataaaatctttgtagccaaattctgtcagtggaccatacgtttctacatgatacttgttaataggatgtccttctttatacatccatcttgaataccattcgctgccgtaggcaggcacagaataaacaccccaatgaatgaatataccgaacttggcatcttcaaaccatttcggtattctgtagttttgtgcaattgatgcagaatccggtttgaatatgtcagtaccaattggagaagctgtagtctcaatgttgggcttgtattccgaattgttacatgcgcttaagcaggcaatagttgcaactgctaatgaagtaatgattgctttcatttttatagtttttataagtttaaagttctacatttattgttgtcttagctgttttaagtcctttagaagtggcggtwatattyntttttycttkyttkttttynntcmgactgaamaawtarcatacacataccsctgratgcttttnnttttkggttytatgaacgactccgttgttgcagcattaccgtttcctacagctctaaagtgtcctgcaccttcaacactgaattctaccagattgtctgcctcagggcatagattaccgtctctgtcttcaattcttacagtaatatatgacagatctttgccatcggcagttattacctttctgtctggtataagtttgatttgagctggtttacctgctgttctgattgttttttctgcctttagttcacctaaattattgtatgcctttactgtaagttcacccggttcaaacggaacatcccacgagagacgatattttgactggaatgtgttaggggcataatgattaaacgacaccataatttcagttaggtctcttccttttacccttttgcccaatgattttccgttaagaaaaagttctgcctcataacagttggtgtaaacatatacaggtatgttcattccttttttccagttccaatgaggaagtatatgaaccatcggtttatctgtccattggctttgatataggtaaaatctgtctttaggcaaaccgcacaaatccactgctccaaagtatgatgatcttgaaggccagtcgtcattccagtatccatgggttgaattatctctgcctccgtatggtgtcggttcgcccagatagtcaaatcctgtccatataaattcccccataaagcgtgggttcatttcctggaaatggaactctatatcaggtgggtatgcccatttgggaccgataaggtcgtagcttgtaacctgatttgtgccgtttttctcatatttctctataggtaggtgataaactccacggctacttgtacacgaggaagcttccgagccatataatggaagatcaggatatagtctttgaacttcagcatatttgcctggtttgtaattcattccagcaatgtctacctgctgtgccatgttgttgtcgaatggggcagggtaatagttgaacccacatgtacttggacgtgtaggatcaagttcgcgacaaatatctgcaagatattttgctactgtaaatccttttttcttatcactttgctcaagaatttcattccctatactccacattattaccgacggatggtttctgtcgcgcattatgaggcttgtaaggtcttttttactccactcatcaaaatacaggtgataaccgttgtctactttagcctttgtccattcgtcgaaggcttcatcaagcactacaagtcccattctgtcgcacaaatcaagaaattccggtgaaggagggttgtgtgatgtacgaatagcattcacacccatttccttcataatctgaagctttctttcatctgctctaacgttgactgcagctcccattggaccgttatcgtgatgaagacatactccgttaaatcttattttttcaccgtttaggaaaaatccgtctttcgtaaaacatattttacggataccaaagtcggtaaaatatgtatctgtaaggtcttttccatcatatatttctgtcttcagcttatacatatatggatttttctgtccccagatattaggattcaacatatttatatatgcaagagtttttccctgctccccggcagctacttcaacattatcatttaatattgctaccgtttccccctgagcgttgataatgctatgcctgatattaaatttcccattgccgaatgttgcgtttttcacagttgtttctatctgtactacagcttttggcttagtgacagtaggagttgttacatatactccgtgttcgggtatgtaaaccttgttgtctactcttaaccatacatttctatagatacccgcaccgggataccatcttgatgacagatctcgcggagtaagctgtacagccaatacgttttcttcacctatttttagatactttgttatgtctatctcaaacccggtgtatccgtaaggatgttcgcccaccttaactccgtttatccaaaccttagcttcgctcattgctccgtcgaagccaattcttacaattttgtccttccattgtgcatccccaatgaaggtctttctgtmccagccagtaccatgaaatggcagtccgccgcatcttgcattgtacttgctgtcaaacggaccttctattgcccagtcatgaggtaagttaagttttctccacgaatcatcatcgaacgatatagcttcggctccttttatttcacctttaaagaagcgccagttttcgttgaaggagataccatccgttactgcgtttattgtgttacccagaatgagcaacaggataattgtacctagaagtcttttcattatatttttcgttttaataaattttctcagcaaagttattttccatattgatatatctgactgctcttgtgtctccatcctcacacaagcctttatttccgtcagttgaataggttgaactatagtacctttttcccatcaggtctacaacataagaaagcttcatgttgtcattgctgctttttataatctcatcagtcaccagtttcttcattgtcgccatatctgatatatgaaccagtgaataatctccggaaactaccgcatcatgcaaaagtttcctgttctttttgaagctcaacagaatcttgttctttctgctttttactccattcccatgttttactaatccgaataattccttgaattcttcgtagttattgaaattatagtatagcatatcattctgaagcaattttattaaagactgctactttatcaaatctgctcgtttttattatcttaatttaaaaatataatgatcaatctatcgaattatctttgtacacgtccgcttgcatcaccaccagccaaagcttcaacttcttcaatagataccaagttgaaatctccattgattgtatgttttaaagccgaagctgcaactgcaaactccaaggcctcactctgagttgctttagtaagcaagccatggataataccaccagaaaaagaatctccaccacctacacggtcaataatcggattaatgtcgtatcgttttgatgtatagaattcttcaccattgtaaatcatagctttccatccgttatgtgtagcagagaatgattcacgcaaagtagagattacatatttgaatccgaactctttggccattgcagtaaaaatacctttgtatccttctgcatctgttttgcctccttctatatcggcatcaggcttgaatcctaaacaaagttctgcatcttcttcatttccaatacatacatcaacatattgcatcaatggacgcataatggactgagccttttctttagtccaaagtttcttgcggaaattaaggtctactgagactgtaacaccatgacgcttagcagcctcacaagcaagtttagtcaactcggcagctttatcagaaatggctggggtaataccagaccaatgaaaccagtctgctccttccataatagcatcaaagtcaaagtcacatggttctgcctcagagattgcagagtttgcacggtcgtatataactttacttggacgcatagaggccccagtttcaagataatatatacctatacgatcaccaccacgagctatatagtcggttctaacaccatatttacgaagtgcatttactgcagattgccctatttcatgcttagggagcttagaaacgaaataagtttcatgtccgtaatttgagcaacttacagctacatttgcttcaccgccgccataaacaacatcaaaggaatctgattgaacaaaacgtgtattgcctggtgtagacaatctaagcattatttctccaaaagttacaattttcatcgtctattatttttaatattaataaataaagttaatttattgtcagaatgaattacttgctatttcacatttaccgcattacccattgcaatgagaaccactcccagcaacatagcaacaagagcaaaatacaataatcccttcgcttttttaggagcatcagcccactctttagtaagaagtccgcctatcaccgccagaaggacagatactgtattataaatggcataaccaactgtattgcctgccgaacctaaagaaaaagcagcgtacgcaaaagatgcagaagcagtataattcaaaaatgccattacaaatgccatccagaaattagacaaacagtattcattcttaaacagaccccacgtcttattcttacacaatttaattacaaaataaggaatagcataaagagctccggaaagatatataatgaacattattgctatagcactcatccattcgggatttccctgtgttacaacagcctctgtaataggagcattacctacagcgtttgccagactgaaacctgtagctaaaagaccacctataagagctatgaatattcctcgcaaagtcttgccagacgaaagttgttccattgaatctttatgttccgaactttcttttcgaagtataccggcacgcccgtttgatactactcctataagaatgattataagacctattattatataccataaagcattttcagaaggcaatccgtcgacaatgaatggcaaaatagaacctaccaatattacagaacctataaatattgagaaacccaatgaaactcctatataatctattgccttgctccatagctgcactcccattccccaaagaaaagatgtcagtaccatgagataaagtacattcgaaggcaatgatgcgagaacatcacaaaaattgtctatcaataaaaatgaagacaccaaaggcattactatcaatgccaggaaaaaaaacagaaaccaggtattctcatatttataacctttaatatatttctcaggcaaagcatacaagcccaacataattccggctcctacagcccataatattccatttatcataatcttattctgttaaaaattaaatttaaatattgtatgactctcaaatttctcacccctgtcggtaaaaaccttatttgcatcttttaaattaggaccattaggtactctatgtgtctcacaacaaaaggcacagtacttaccatatttctcactttcatttctttgtaatgaagacgaagtatatttggctgtatacaggagcattccttcttctgtcgtcagaacttccatacttacattactagaagggcaattaatctcggcaaccttctccggaacatcagtaaatcccttatcaaacatatagaagtgctcaaaaccatcatttatctcattatgaacctgacctatattccttgaactacgaaggtcgacgctgctgccagatatgtaaataatattcttttctacactgcctgaaggattcattggcaatacattacttgctgcaacatatgcattatggccttctacattctccataaatcccgaaagattgaaatatgtatggttagtcatggatagtggtgtacgcttatctgtatccgcttcatatctgaaacttaattcgttattattattaagagcaatgataacaaccgctgttacattaccagggaacccctgttcaccatcgggagagaaatacttcaatgttatagagctttcattttcaaagctatcgcatccgataacaccccatacttttttatcaaaaccctgcacacctccatgaaggcaatgggtattgtttacatttgctgaaagtttcacgtcatcataggacgcattttgaatggtggcgcaataacggccaattgtagctccgaaataaggtgcattagaaagaaactcatcggaaaaatagccttcgagggtgtcaaaaccacaaactatattccttttatttccattaccaacaggcaataagacagacgtaacagttgctccataattcattacagagacttctacaccattatcattaacaagtgtatataatgtgatttccattccttcgacggagccaaatctctcttttcgtattttcatatatcatagttttaaagttattaagttatattcttttgataacaccaatgaggttatatcaaatataatgtttgatatagcctcattgagaaaagaagatattaaagcttcttgtatggttcaagcatttcccagttgaactctactccaatacccggttcatctgacgctatagccatacaatcctgaactaccagcggacgacgcgtataacggtctatcggaaaactatggacttctatccaaccggcatgtctctgtgatgatacaagacttacatgcagttcctgcattccatgcgaacatacagttacgttgtgttcttcagcaagtttggctgcttgaagccatcctgttatacctccacagtttgatgcatcaggctgaacatatttcagtttggactgttccatagcatattcaaactcgtgtatggtgtgaagattctcacccatggcaagaggcatgcctgttgcatcagtgatttgagcgtagcctttatagttgtcaggaattgtaggctcttcaaaccaggttatatcgtattgcttgatacggtttgccatatcaattgcctgctctactgtcatggaataatttgcatcaaccataaatgtaatgtcaggtccgataaactctcttacagccttgattctttcaacatcttcatcaggattttcgcgaccaatctttattttaacaccattgaaacctgctttcagatagccatcgatattcttcagaagtttgtccaaagggaacagaaggtctattcctccacaatatgccttacatttgtttgaagctccaccagccatcttccataatggctgaccggcatgcttacatcttaaatcccataaagctatatcaactgcagaaattgcgaatgaagcaataccacctctaccaacataatgaatatgccattgcatcatgtcgtaaagctcttctatattgtctgcatcctttcctataagtgcaggaatcaggtcattgtcaatcatggccttgattgaatagcctcctttaccaccggtataggtataaccagtgccttcacttccgtcttctaattttattgtcgctgttattagctcaaaatagaaatgatttccatgctttgcatcggcaagtacctcatccaatggtacttgaaacaattgcgttttaacagacttaataatatgtgacatcttattattctttataacggatatagaatgttttcttctcaagatactgttcgaaaccatacttgccatcttcaccggcagctccactcagcttgtagccattgtggaatccctgatgcaattcaccatgaggacggtttacgtaaatttctccgaactcaagatcggtatttaacttcatgacacggttaagatcattagtaaataccatagcggccaaaccgtattcgcaatcgttagcataattgattacttcatcatagtcggagaatttcagaacagggagtataggtccgaaagactcttcgtgtacgattgtcatattttgtttcacatcagtaagaactgtaggttcaaaccagttacctttctggaattgctcaccttcaggaactttacctccacatgccagtgtcgctccttctttcaaactgatttctacaagctgtttcatgtgttcaagctcattcttgttgacctttggtcccatatcagatgttggatcgaatgggtcgccaaccttaatcgctttaactttttccatgaatttagccataaattcatcatatatcgactcgtgaagatacaggcgttcattacatgtacaaacctgaccacaattatcaaaacgagaagaaagtgccgcatcaacagccgcatcaatatcagcatcatcgaatacgatgaaaggtgcctttcctcccaactccaactgaacatggataatattcttagccgcagaacggtaaatggcctgacctgccggagtactaccagtcatagtgaccattttggtaataggattttcaaccaaagctgtacccataactctacctgaaccggtaataatattgagaacgccatcaggaacaccagcctttttggccatctcacccaacatcaatgttgcaataggggtttcagtagtaggttttacaacaattgtattaccagctacaagagcaggacctatctttctgcctgccaaagccaatgggaaattccatgctgtaattgccactaccacaccacgcggaattttctgaatcataagatgttcattaggattatctgaagggacaatatcgccttctatccttcttgcccattcacatgcatatgcaataaaagaacaacaaacatcaacttcaaactgagcaaccttgaacagttttccttgctctgtagaaatcattctggcaagttcttccttatttttctttatttcttcaataaaggcataaagtatttcggctcttcttctggctgttagttttgcccatgatttctgagctgcctgtgctgcctgtaaagcaagatcggcatctttctcatcaccgtttgcaaccattccgacaactgagtcgtccgaaggattataaacttcagtatattttccatttaatggtgcgacccacgcaccattaatatattgctgatatgtcttcataagtatttcaaaaaatagtatttataacaatattatctacccatccagccaccgtcaaccagcatgattgttccatgcatataagcagaagcttctgagcaaaggaataccaccggaccaccgaaatcttcaggagtaccccaacgtccggcaggtatacgagtaagaatctgctcagaacgtactgaatctgcacgcaaagcagctgtattgtcggtagcaatataaccaggagcaatagcgtttacatttacacctttaccagcccattcattagcaaaagccatagtcaactgaccaacagcacctttacttgcagcataacccggtacatttatacctccctggaaggtcaacaaagaagctgtaaatacaattttaccattgcctcttgccaccatatcctttccgatttcacgtgtcagaataaactgagctgtttcatttgtagcaataaccttatcccacatctcgtcagggtgttcggctgccggtttgcgcaatatagtacctgcattattaatcaaaatatcaattacagggaaatcagccttaactttattgataaaatcatacaatgcgtctctgtcgctaaagtcacaagtgtatcctttaaagttacgacccaaagccttaacttctttttcaacttcgctaccttttggctccaatgaagcactaacaccgataatatcagcacctgcagcagccaaagctactgccatacctttacctattcctcttttacaacctgttacaagagctgtcttgcccttcaaactgaatttatttaaaaagtccatattattatttagtttaaaatcattaataatgtaatttgtcacttgttaatttattatttacccttggcagtctaccaaatatttcattccactaggattgcttacgatttcttcgaataatgactgtatatttgtcaaaggctgaacattagagatgatgttttccaacggaagaactttctgattaaccaaatcaatagctttttcataatcttcatattcataaacacgagctcccatgaatgtaagttcacgccagaacatcatcttcaagtctacaggtcttggttgagcatgtatagcaacacctactatacgggcacgcaaaccggcaatttctgtcatagcgttaaccgtactctgaacaccggcaacctcaaagacgacatcagccaaagaaccgttgcttattttcttgacatattccaacaggtcttgttcagctggactgattacatcaaatcccatctctttaagaagctttattcttacaggattaacttcagaaacaacaatctttgcacctgttgtttttgctaccattgccaccaaagctccgattggaccaccccctaaaactacggcaacttcaccggctttcaatccgctacgacgaacatcatgacaagctacagccaaaggttcaattaaggctgcaagtttcaggtcgatatcatccggaagtttgtgtaaagtgaacgccataatgttccaatactgctgcaacgcaccttcgctatcaataccaataaatttaagttttttacagatatggctccaacctttatcagaagcatcttcaagacgattatcgagagggcgaacaactactttatcacctactttatatccttctacaccttcccctatagcatcaattactcctgacatttcgtgaccgatagtctgcgggatagaaacacggctatccatattaccatgaaagatgtgaacatcacttccacatataccacaataagcgaccttaattctaacttcgcctttagcaggtgcaattaattccttttcttttacagtgaaggttttatttccttcataataacttgctttcatttctttataatttaaaacatttaactatttagcttttccaaaacctttggctacaggaacttcaatttcactattataattctgtccatctgtctgaatcatggcaggataatatcggtaataatttccgttagtatatttgtgcaatgacttggacatctttttattcatttcattaaactgtttagtagcttcagcctgatcgccaatcaagaagaaatatttatttgttgagatttctttaccgcccttgtctgtcagtgtgagttcaacatggaacatcttcttaactgtagacagaacattataactgatatcagtgagtttaaatgcacaattctcgcctatcttacttaccttgtagtcagcctctttaagaacattacccacatcgtcttttatacggatagtaacatttgagttcttatattctttataaaggtcgttaactatccatattgcacctttgaagctttcatcattatgccatctgcgccttgtgaaatcaagacatacaagcaatggctgataggctctcttaacaaaatcgtacgatctcttaggctgttggtaggcatctacaataccccacttcatgtcaggccagtaagttatccaatgacaaagggctattccgctaagtcttggtttctgacgtcggaagaactctacaccattctggaatattacaccttgagcatcctgagtagcatctacaaactcctgcaatgtcccattggaacgttcttcaccgaatgtatcgaagttttgcatcttaagcttatccaaatcagcccaatgatgtccccagctcaatccgggaggccacatctcagcttcaggaatgaatttcttgagactctctacattgggtacggaggttatggcaaactccggtacgatagggtaatcctgctttctgtaccaatcctccatcagccatcggcccattgaatagaaatacgccaatgcatgggttgcctccttaggtttataaccggcctcttgcgaagcggcacatgttagaggagaatcggggacataaggcaatggaagataatgctgaagggtatcacccaattgcaacagaaagtcattggcaaacttaacatctctggttctcaagaaatattcctcgcctccttccatcattatgagcgatggatgattacgacgttctattgctacactcttggctacctgcaatactttctctacataggatttttccattggaatattaccggaacccaatggcaacatatcctgccataccgttagacctaatgaatcgcatatctcataaaattcaggtatttcaggattatgccagccaaatattctgatattattcaaattggcttccttggccaaaacaagaagtttctcgtatgttccgggagctgtacgacccacaaatatatttggtgtgcctccccagcatgctgaacggataaaaacaggtttaccatttataactgttgtacgtggaaaacttacatcaacacccttcttaaaacctggattccatgccgaggttacctctctgataccaaacttaacctccttataatcgtgtctcacacttccgttttgagcggaaactctggctatgtacagattctgcttacccatatcccatggccaccacaattcaggtttgccaacatggaaattcttcttatacatatgtttgccgggaggtactgtctgtttgaacttgaccagaataggtttcgactcaaaattatatccctgcacagaagctgttatatccatcgacattggttcgcttgaagtattttcaagcattatctccatatccacatcagcactagagttcttgtctatcctggtacgggcataaacatcgtctatcctaaccttaccggatgtcacaagtctcacaggacgccaaattccgaatggaatcaggtctcgccaatagtcgccgaaccatggagtcttcaaaccgccaagttctgtattgatatgagtaggaggattaagcttgacagtaagcatattagcaccgcggcgcgcatccttacctattcttaagtagtctgttacttcaaaattgaatttctcgaacgctccgtcatgccttcccaaataatgtccgttgagccagacatcgcagctatagtcaacaccgtcgaattcaagacggatatacttgttctttacatcctctgtaacataaaactgtgctgcataccaccattcatagtgctgaacccactgtgctttaactgagttcctgccaaaataaggatcgtctatggctccggctttccacaaatcagtgtaaacatcgccgggaactttagcaggattccaaaccaatgtctcaatatcctcagggaaaattttatggattccctgcttttcaccttcaccaggacgcatcatcttcattttccaattataaccgctcaagtctttaacaagctggttgttcattgaaaatgattcgaagcccggctgcgcatttgaatatgcaataccaagcataatcaaaagcgcagacaagatatttctcttcataagctattattttcgctttgttgattcaccaattgcagtatgagtctgtttagtccatgtttcaaaacgcataatgcattgataattataggtaatgtattgatgagtcaatccccaacgcaatatttcagtaggttccttatcattatcagcacttctgttcagaccaatagcatgaggtgctcctggtataacggacattatctcgaagtttatgccgtctggcgaccactgcaaggtattcttttccggtccgtctgttgtaatcaaagatgttatacctcctttataaggccatacacatatctcgtgtccactattgcttataggattatactctgatttggtataaggaccaagtggattatcggctatagctacaccatgtttgatttctctacctccccaggtaatttcctcacccattctttcacctttataataaagatagaatttaccattgtatggtatgatacatggatcatgcactttatgactgtcaaagtcacctttagcttttactttaaatctattatcctcttctccttcccaaacgccattgtcggatggggtaagaaccggcttatcagtcttttcccacggaccatcaggagaatcagcccatgccatagcaacattttccttaactctaactgtgtatggcgatttaacagtctggtaacaaagataatacttaccattccactgcataacttcaggagtgaaaaccgatctgtcatcgtatgctcctttttcacctcttttaacagccacaccttcttctttccaggtaataccatccttacttgtggcataccatatatcgcatctgtcccatggaaaaaccttttcattttcaacatccccggcaaatccctgagtttcaccataactttttgaataccatacatagtacttgtctccaaccttaatcatagcacttgggtcgcgtctaactataccttcctcataagccaaatcaccttttaaaggcatcatcttatattcaaagaaccacgaattgtcacgctgcggccattccatggcacgtttcatcgcagcacttaatttatttcctttgggtattcccaaagaatccgctttacgctggtcataagcactatcatcagtagacactgtagcagaaggctggtttacacaggaggcaaacaacgctatacctcccactattgttaatacattcttcagtaacataattattataattaaatcatttaacttcaacctttaaatcatttgaactaatgctgccagaatttgcattgatgttcagaatgccggccttgtccgtagcctgcaacactagcaatgctcttcctttataggtttttactgtatttgatttatagtttaaaacattcagatgatcgccattttccacacccaataatctgtaattgccaccaatattaaatgttatttccttttcttcccaagaaatatttcttccgttcctatcaatcaattgtgcagtaacatgtatcacatccgtattattagcatcaactgcaaccttatcaactgatagcttaattgaatttgtttctttggtggtataaattgcagaagttgttttcttaccgttctttttacctttagcaactatatttccatctttaaaatctaccgaccacttatagatatgatcctcaaaatctttcaggaagcgttttcctaaggatttgccattctggaatagttctatctcatcgcagtttgaatatatctccacaacaactttttcacctttagtataattccaatgactgtttacatcctcccaaacccaaagtcgttgagtccaaggctttttaggatccttatcagtaaactttccatccttttcaacataagaagacttgttggctgtctgagaatagatagcaataaatggcgcatcagtccaaagtgatttcatcatatggaaagaaggtttttcaaatcctgccaaatcaagcagtccacatccgatagctctttgtggccattctctaccttttgttccaacttctcctaaataatctacacctgtccatataaacataccagggatatagtcacgttcgataaccgctttccattcatgccactgaccgagattttcagtacccattgcaggtttgtcaggataattcttgtgggcataatcatacattactcttctatagctgaatccggctacatcaagagcatcaatatatcctgtctcataacttatagaaggaagtatacaattagctgttaccggacgagttgtgtccatctcacgagtccatgctgccagtttcttcgctgtgcgaccaatatcataagtctgcttaggctgtttagcccactcttccctgattctctgagttgaataaggaggctggttccagaaatatccaccaccggcatctgcactaaagaaacctgttgactccttacatcctttataagtccattctatttcattaccaatactccactgaaatatacatgggtgatttctacttctaagcattacattcttaaggtctcgttcggcccattcctgaaaatattcgcagtatcctcttgttatataatcaatggactgttcatccatgtttaatcgcttatcttttggataatcccattcatcaaaaaattcttcctgaacaagaaatcccatttcatcacaaagctccaggaaagcatctgcaccaggattatgtgacaaacgaatggcattacaaccaccatcttttaaagtctgtaatcgtcttctccaaacatcttcaaccaatgcagctccaatcatacttgcatcatgatgaagacaaacacctttaatcttcatgttctttccgttgaggaaaaatccttttttagcatcaaactttatacttctaataccaaaaggagtttcttttgtatcaacaacgttaccatctacaagaatttcgctctttgcaagatacattgaaggagaatcaacatcccaaagggaaggatttgatatttctaccgactggttgattttcatttcctttcctgcctctatcaaaaaagatgtcagtttctcgcctactttcttatttttggagtcaaaataagaagttcttacttcacctgctcttggtccggaatagtcgttcttgacccttacctcaatatttacggttgctctttcagaggaaactacaggtgtagttacaaaagttccccaaacaggaatatgcaacttatcagtaaatatcaactgagtttctctataaatacccgaaccggtataccatctgctgtctgcatatctggaatggtcaattctgacagaaattctgttttcttgtcctttcggattcaaataatctgaaatgtcataaaagaatggagagtatccatatggatggaatcctaattttctaccatttatccaatattcagaattattgtacaccccatcaaaaactatatagcatttcttatcaacgaaattgtcgggtgtatcaaatgttttactataccaaccaattccacctttaaggaaaccggtgcaaccttccgctgtagactcaaaaggaagatcaacactccaatcatggggcagattcactgttttccacgaagacggattatagtttacaaatgaataacaggcagaatcagaaagtgtaaacttccacccgttattgaaatcggaattattatttaacgcataagcgttggtaaaaagactggtcagaagaagactgacagttactaaatgttttctcatggttttaaaattgaacattagtatttgattttctgatgcaaataaaaaataaagtattgatatggatgatgggagaaatattaaaaaaacatggtgtttttatatgcatggtatttaaaaaccagaaataatgtaaatgagaacagtaattactatataatattgtgcttaaaaaattacatcctaatggacaggatacaaaaccaattcaacaataatttcgcagtcataaaaatgatttctaacaatcctagtagaattcaaattattaatgcgaaaattttttataatcaatctattctatcatatcgcataagttactcagaaagaaaatatacctatcattaataatttaggtttctgtaaactttgtacttcatcccaagtaatcttctcttactcccaccacccctttaaggtatgtcgctaaagttccttatctacccagagtataatcggtataactcgtttttctattgtctttcattggtcttttctgctgtccgcttcctcatttatcggtgttcccccatctaagagcctttctttttatacggcaaaggtatatggtcgtggtggaaatgaaagagttccggcctgcagcctttgccctgaaaaaaataacgatgttgtctgcgactgccccaacatttttttcgttcaaaacttttctaattccactcgcccgtacctaaagaagccgtaaaaaaaaggctcaaactcagatggggaatgattctcaatctaaaaaaaagtcagcggacaaaagaccaaaccaagacaaaggttttcaaaaaaaaggtctaaatctagctgaagaataattcaagtttttaaccctctaaagcatacggatatgagaaaaggtttcgaagttaacggcgattacagactgatggacagttcagaacttgtgtatattcttaccaacagcgcagtgatggtaaacaaggtacaggaaaaggaagtggtttatggcgaagagtgca

SEQ ID NO: 17 - DNA, 10523 bp, Bacteroides vulgatus
  misc_feature (495)..(498): n is a, c, g, or t
caaaggattgaaaatataaccttaggaattttatctgaagtattaataagggctatcccaaaaggtctaaaagtaaattttatcctttctgcaagtatctgtaggatggcaactgcattttttttctttttgggcagcccttattaaaatttattcttattttaggttatatacattcatgtccatttatgtaaaaaatcctgctgaccttgtttatgtcttgtcagtcaccatttgcaaaaccatatttgaccctcaaagaggctgaatttgataagcaacttgctacatactcataataaggagctaaatagaacacgaatgggaaatactcaaatgccaaactaaagaagatattggccaaaataaacgttataccgagagagaaacttgatttttttcaacttcctaaaacgttgttgttcaaacatttctacttatttgtacttaccagttgaacctacgcttccctaataaaatgtctatggtaaaaannnngttaaaaaatcctcccacttttgttagatatattttttttgtgtaattttgtaatcgttatgcggcagtaataatatacatattaatacgagttagtaatcctgtagttctcacatgctacgaggaggtattaaaaggtgcgtttcgacaatgcatctattgtagtatattattgcttaatccaaatgaatattataaatttaggaattcttgctcacattgatgcaggaaaaacttccgtaaccgagaatctgctgtttgccagtggagcaacggaaaagtgcggccgtgtggataatggtgacaccataacagactctatggatatagagaaacgtagaggaattactgttcgggcttctacgacatctattatctggaatggagtgaaatgcaatatcattgacactccgggacacatggattttattgcggaagtggagcggacattcaaaatgcttgatggagcagtcctcatcttatccgcaaaggaaggcatacaagcgcaaacaaagttgctgttcaatactttacaaaaactgcaaatcccgacaattatatttatcaataaaattgaccgtgacggtgtgaatttagagcgtttgtatctggatataaaaacaaatctgtctcaagatgtcctgtttatgcaaactgttgtcgatggattggtttatccgatttgctcccaaacatatataaaggaagaatacaaagaatttgtatgcaaccatgacgacaatatattagaacgatatttggcggatagcgaaatttcaccggctgattattggaatacgataatcgatcttgtggcaaaagccaaagtctatccggtactacatggatcagcaatgttcaatatcggtatcaatgagttgttggacgccatctcttcttttatacttcctccagaatcagtctcaaacagactttcagcttatctctataagatagagcatgaccccaaaggacataaaagaagttttctaaaaataattgacggaagtctgagacttcgagacattgtaagaatcaacgattcggaaaaattcatcaagattaaaaatctaaagactatttatcagggcagagagataaatgttgatgaagtgggggccaatgatatcgcgattgtagaagatatggaagattttcgaatcggagattatttaggtactaaaccttgtttgattcaagggttatctcatcagcatcccgctctcaaatcctccgtccggccagacaggtccgaagagagaagcaaggtgatatccgctctgaatacattgtggattgaagacccgtctttgtccttttccataaactcatatagtgatgaattggaaatctcgttatatggtttgacacaaaaggaaatcatacagacattgctggaagaacgattttccgtaaaggtccattttgatgagatcaagactatctacaaagaacgacctgtaaaaaaggtcaataagattattcagatcgaagtgccacccaacccttactgggccacaatagggctgacgcttgaacccttgccgttagggacagggttgcaaatcgaaagtgacatctcctatggttatctgaaccattcttttcaaaatgccgtttttgaagggattcgtatgtcttgccaatctggtttacatggatgggaagtgactgatctgaaagtaacttttactcaagccgagtattatagcccggtaagtacacctgctgatttcagacagctgaccccttatgtcttcaggctggccttgcaacagtcaggtgtggacattctcgaaccgatgctctattttgagttgcagataccccaagcggcaagttccaaagctattacagatttgcaaaaaatgatgtctgagattgaagacatcagttgcaataatgagtggtgtcatattaaagggaaagttccattaaatacaagtaaagactacgcctcagaagtaagttcatacactaagggcttaggcgtttttatggtcaagccatgcgggtatcaaataacaaaaggcgattattctgataatatccgcatgaacgaaaaagataaacttttattcatgttccaaaaatcaatgtcatcaaaataatggagcggtcaggaaatttctataaggcaatacagttgggatatatacttatctccattcttatcggatgtatggcatataatagcctctatgaatggcaggagatagaagcattagaacttggcaataaaaaaatagacgagctccgaaaagaaataaacaatatcaatattcaaatgataaaattttctctattgggtgaaacaatactggaatggaacgataaagatatcgagcattaccatgcacggcgtatggcaatggacagtatgctctgccgtttcaaggccacctatccagcagagcgcatcgatagtgtgcgcagtcttttagaggataaggaacgacagatgttccagatagtccggttaatggatgaacaacaatctattaacaagaagatagccaatcaaattccggttattgtgcagaaaagtgtgcaggaacagtccaaaaagccaaaacgaaaaggtttcttgggcatctttggcaaaaaagagggaacgaagccaacgacaacaacgactacgctccgttcatccaatagaaacatggtcaacgaacagaaagcgcagagccgtcgattgtcagaacaagccgatagtcttgctgcccgtaatgcagaacttaacagacaactgcaaggattgatttgccaaatcgaaaagaaggtacaatctgatttacaaaatagagaaagcgagataacagcgatgcgtaaaaaatcatttatgcagataggcggcttgatgggatttgttcttttgctgttggtcatttcctatatcatcatacaccgtgatgcaaagaacattaaacgatacaaacgcaagacaacggatttgatcgagcaattggaacagtccgtgcaacaaaatgaggtactcataacctcccgaaagaaagcggtacatactattacccatgagttgcgtacaccactgacggcaataactggctataccgaacttttgcggaaagaatgcaatagcggtaataatgggcaatatatccgaaatatactgcaatcctccgaccgtatgcgggatatgctcaacactttgcttgacttcttccgcctggacaacggcaaggaacagccccgtctgtcaccctgccggatttctgcaatcacgcacacacttgaaacggagttcattcctgttgcagtgaacaaagggttgtccttgtccgtgaagactggacacgatgccattgtattgaccgacaaagagcgaataatacaaatcgggaataacctgctgtcaaacgcagtcaagttcacagaagaaggcggtgtttctttgattactgaatatgataatggagttctgacactggtcgttgaagatacaggtacaggcatgacagaagaggaacagaaacaagcgttcggtgcgtttgaacgtctatcaaatgccgccgcaaaggagggtttcgggcttgggcttgccataatgcgtaatattgtgtcgatgcttggcggaacaatccgtttggacagcaagaaagggaaaggcagtcgtttcacagttgaaatttctatgcaggaagctgaagaacagcttggatatacaagcaatacacctgtttatcataacaataaattccatgatgttgtcgccattgacaatgatgaggtattacttctgatgctgaaagagatgtactcccaagaaggaatacactgcgacacttgcaccgatgctgcggaactgatggaaatgatacgccagaaagaatacagcctgttgctgacagacttgaatatgcccggtataaacggtttcgaattactggaactgttgcgttcgtccaacgtgggcaattcaccaacaatcccggtggttgtggcaaccgcttcgggcagttgtaacaaaggggaactattggcaaaaggctttgccggatgcctgttcaagccgttctccatatcggagttgatggaggtttccgacaggtgtgccataaaagaaacaccggacgggaaaccggatttttcagctttgctgtcttacggcaatgaagccgttatgctggaaaagttgatgacggaaactgaaaaagagatgcagacaatacgggaagcggcaacagaaaaagacctgcaaaagctggattccctgacacaccacctgcgcagctcgtgggaggtgctacgtgccgaccaaccgctaaatgtactttacagattgcttcatggcgatgtactcccggatggtgaagcgttaagccatgccgtgactgccgtgctggataagggagcggaaataatccggttggcagaagaggaaaggagaaaatacgaagatggataagacaacaataattgtggtagaagacaatatcgtgtactgcgagtttgtctgcaacatgctggcgcgggagggctaccgcaccgtgaaggcttaccacctctcaaccgcgaagaaacatctacaacaggcgacagataatgacatcgtggttgccgacctgcgcctgcctgacggtaacggcattgaccttttgcgctggatgcgaaaggagggaaagatgcagcccttcatcattatgaccgactacgccgaagttaataccgccgtggaaagcatgaaactcggctcgatagactatattcccaaacagcttgtggaggataaacttgtccccctgatccgttccatactgaaagaacgtcaggcaggacaacgccgtatgcctgtgttcgcccgtgacggttccgcatttcagaaaatcatgcaccgtataaggctggtagccgctaccgatatgagcgtgatgatattcggagagaacggcacgggtaaggaacatattgcccaccacctgcacgacaagagcaagcgggcagtcaagccattcgtggcggtggactgcggttcactcaccaaagagcttgcgccctcggccttcttcggacacgtcaagggagcgtttacaggagcagattgtgccaagaaaggatatttccatgaggcggaaggcggcacgctgtttctggacgaggtaggaaacctcgcgttggaaacccaacagatgttgctccgcgccatacaggagaggcggtatcgcccggtcggagacaaggcagacaggagtttcaatgtccgcatcatcgccgccaccaacgaggatctggaagcggcagtgagtgaaaagcgttttcggcaggatcttctgtaccgcctgcacgacttcgggataaccgttcctccgttgcgtgactgtcaggaagacatcatgccgctggcagagttcttccgtgatatggcaaacagagagctggagtgtagcgtgagcgggttcagttccgaagcacgtaaagcgttgctgacacacgcatggccgggcaacgtgcgggaacttcggcagaaagttatgggtgctgtattgcaggcgcaggaaggtgttgtcatgaaagagcatctggaacttgccgtgacgaaaccgacctctactgtcaacttcgccctgcgcaatgacgcggaggataaggagcggatattgcgtgcgttgaaacaggcaaacggcaaccagagtgtcgccgccgaactgctcggaataggcaggacaacactatacagcaaacttgaagagtatggacttaaatataaattcaagcaatcatagcctgtaattcactgaatttggctatctttgcataacatttgagaaaaacggcgattggcaggagcttttcgccgccaacatataggataagaccgcaaggcgtttcaagcgaaaatctggtaaattggaactacggagacgattgcgtgatgcttatgctatgcttacgcatagcgtgcattcacgtactctccgtaaaggctttaccagagccatcgcttgaaggtagtgtgaattgcacgctacttttttgcccttgcctaatgaaaggtaacgattatgggtaaagttcagattctcgccgtactgacgatggacggatgtctttcttcagagttatattataaagcacatcaggatttgtgccttgaccgttgcggtcttgatgaaatcaggaagaacgccctttaccgcgtgacaccagactattccatttcaatgctgcacgaatggagaaaagacggcacaaacatccgttacctcgcggaagccacaccggacacggcagactatataaacggactactgcgtatgcacgctgtggatgaaatcatactatacaccgttcctttcatatccggaagcggacgacatttttttaagtcggctctgccagagcaacactggacgctttcctctttgaaaagttttcccaacggtgtatgccgcattatctacatccttgataaaaaagcaagatagccaaaatgtgcggcaagcatacatttttattttcaagaatagaataaatgttctgattacaaacaatttaagtcggagataatttgtccctgtgaaaaaatattgaattttataccactgaaatacaacactttgtaaaattgagcgttggattttttgttttctgccgcgttttttgccaattatattcatgtgcgcataccgaaaacagagtgtaaaatttcaaaattgacaggacatgaattattttttattggcggaaaccgagttcttccgccggataaacgaagccggagactgcaatatggaaaaagcatacacggctttcgccacccaagtaatagaactgtgcaacggcggcatggacatgaaccttaccgtcatcgcgcttgcctacatcgaaatcgagttgcagcaccatccggtgcgtaatctgtcagaagaaagaagagagattgccgcctacgtcagcaaggctctgtctttcgtaagaaagatgcagaaattccttgccacgccccaagtgccaccactaatatccgccaacaacgcaacagaaaccaccgccagccttctttggacgggcaacgccatcgacctcgtggaacttatctacggcatagacgagatgggctgtatcaacaacggcaatatgccgctaaaacagctcgccccgattctctacaagatattcggtattgagtcgaaggattgctaccgcttctataccgacatcaaacgtcggaaaaacgaaagccgtacctatttcctcgacaagatgcaggagaaactgaacgagagaatgctgcgcgatgaagagctggaacgtatgagaagataaaatcaggtataagcgggagaatggtatcatgctgttctcccgtttgagtaaaatctatacgaaaaagggcgttttcggcgcgctattgccccgaatttcagcgaaaaacgctatctttgtacaattgttacgaattgaatatgaacatagacaacctcgatatagtaaaacaactgatagccgaaaaggaaaacgggcaggtggagttcaaggaaaccaccgggcagttggagcgcggcatggaaacgctctgcgctttccttaacagcgaaggtggcacggtgttgttcggtgtgaccgacaaaggaaagatcatcgggcaggaagtgagcgacaagacgaagcgtgatattgcggaagccatccggcgttttgaaccatttgccacactcgaagtttcgtatatcagtatccaaaatacagacaagagtgtgatagccttgtctgcggacagccaacgttatatgcgtccgttctcctataagggacgggcttatcttcgattggagagcgtgacatcctccatgccgcaagacgtatataaccaactgcttatgcagcgaggtgggaaatacgcttgggaggcgatgacgaatcccgacatcaaagttactgaccttgatgaacatgccattatgggagcggtacgtggaggcatccggtgcggtcgcctacccgaagccaccataagggaggatttgccgaccatactcgaaaaattcaacctgttacatgacggaaaactgaataatgcttccgcagtcttgttcggtcgtgatttttacttctatccccagtgcctgcttcggttggcgcgtttcaaaggaactacaaaagacgagtttatagacaatcagcgtaccactggcaatatctacacactgctggacactgcaatgtcgttctttttcaagcatctttccctttcgggcaaagttgaaggcttgtatcgggaggaagagcttgagattccttacaaggcattgagggaatgctgcacaaatgccctttgccaccgctcataccaccgtcccggcagttcggtaggaattgccatctatgatgaccgtgtggagattgagaacagtggaacttttccgccggatataacaatggaaaagttattgagcgggcataattcagaacctcaaaacctgattattgcgaatgttctgtataaaagcgaggttctggaaagctggggacgaggcatcgggcttatgataagcgaatgccggcgtgtcggcattcccgatccggagtttcatacagatggaaatagtgtatgggttattttccgctatacccgaaaaactgtggggcacgacccgacaattacccgacagttaccccacagtcaccccacagttaccccacaggtggaaaaggtgttgtctgcaatcggcacacagacactttcaaccaaagagattatgtgtgtgataggattaaaggacaaaagtaattttttagaactatatctgtatccagccataaggcagaatttggtagagcctatttacccggaaaatccgaaacatccccggcagaaatatcgtcttaccgataaaggaaaagaactgttgatataataacggggtatggtggcgaaaaagaagaaacaacaggggcattactgtcggatttgtagcgagtacaaagccaacgagcaattcagcggcaaaggacactcgcggcatatctgcaaggaatgccggtcgcttcccgatgatgtgaaggcggacatggtgcgctgtaacgaggtggaacgagccgttttcaaatgcccgatgagccgtcaggactgggaactgctggaaaaatatgccaagaagtacaaggacaaggaatccgggcagttcgcgcaggatatgttggacatgaaacggggcaatcagacaccggacgaggatatggaagaggatgatgttttaatagaaggcatctatgaagaggaaaccataccatttgccgaactggaggatgacatccgttatcagttggaagaattgttggcggacaacatcaacgagttcatgatacacaagaattacattcccgaaggcaaggaactgaaagacatcaacgaatgggtcatgaaagaaacccgtgacaccttttttataaaggttattcccgatgccgcttatgacagtctggtggaagaaacgatcaacaggcttgtgaaggaatggaaagaggacggatttgagataaagacctattccgcatcgctggtcgtcatggaaacggaacggctgcttatccgcaggataacccgtaaggatatggacgcactccttgccataatgggaaagccggaagtcatgtacgcttgggaacacggctttaccaaaaaggacgtgcgcaaatggataaacaggcaactcatccgataccgcaaggacgggttcggatattttgccgtcatactgaaagaaagcggcgcattgataggacaagccggtctgatgaatagtaccctaaacgggaacgagactgtcgagcttggctatatactcgataacacatactggcataacggttacggtacggaagccgcccgcgcgtgtttggaatacgcctttggagagctggaactgaaaactgtctgttgcagtatccgaccggaaaacgtggcatccatccgtgtggttgaaaggctgggaatgaccttgtgcgacaaccatacaataatatacaacgaaaaagaaatgccgcatcagatatatgtggca

SEQ ID NO: 18 - DNA, 3972 bp, Bacteroides ovatus
atgtttagattaatcttaagtttaatatcagttctgattatagtttgcaaatcctttgcatccaatgagtttgtcacaagaaagtacactactcttgatggactttcccaaaatgatgtgcaatgtatttatcaagactcaaaaggctttatatggttggccacgaacgacggactgaacaggtttgacggatatgaatttaaggtttacggatatcagtcaaacggtcttaacagtaatctgatagtatgtattgacgaagattcacatggaaatctgtggataggtacagccgatagaggagtgttcctgttcaattctgtaaagaacgaattcgtttcattaaatcttggtcacagcggtattgataaaaatttcacttgcgataagattcttgtcgactctaaagacagagtctggtttcattcctctgatgaaagtatataccttgtaaattatgattttcaaaatggcaaaataaatactgtcttaagatcaacattaaaattaccatacatttccgacatcatagaaatagataatacgataatgctctcctccgaagatggcctgtacgaatgtaacgtcgatggagatgaattactgcttaacaaactattgggatgccctatagcttcagccatagtcatctcatcttctcaaatattgtactcaaatctggaaaatcatcaattatgtttatacgacaagcatacctgcaaggtaagtaccctgttggaaaactgtgatatacgaaaaatggtatataaaaacaaaagattattttatgccactacaagcactgtgaatgtgttgacttttgatgtattgcatgccatcgagtcaaaaccacaggttattgctacatattcttacagctatccgcaaactgtagttcttgataaaaacgatattctttggataggatttttcaagagtggctttatgagtatacgcgaaaataataaacctatagatttattcagaggaataggaaatgatcatatatcgtccgtttatacatttgccaaatctgatatatatttaggcacagaaggctcagggctatatcattttaattccattaccggtaatgccagacttattcctttcacggcaaacaggatagtatactcaacagcatactcaaactacaccgactgcatgtatgtgtctctgatgtacgatggtatttacagtttcacttctgataatgattataaaaagatctcaggtttgagaaatgtgcgcgcaatgcttgccgatggaaaatatttgtggattggcacatataataaaggtcttttcagatatgatttgtccacaggtgtgatgaaggaaatcaaaacatctgacaataaagaacttaagatagtaagaaacatcattaaagatcataagggtaatatatgggtagcttccagcttcggtcttaaagtattggaatctgcagatttgtatatagataatcctgttttgaactcagtcaagggacttgatgaactcgactatatagtgcctgtatgtgaagatttgaatcataatatctggtatggaacacttggacgtgggttaaggaaaatcgtggatttggatgaaaaccataatgcctgcgttgaaaattttagctctgcagacgggttgagcagcaatacaataaaatcaattgttaatggcacggatggaacattatggatttctaccaataaaggaattaattcgttgaatatcaacacacagagaataagatcttatgatattttcgatggacttcaggattatgaatttatggaactttctgctggagtaatgacggatggaacaatgatattcggtggcgtaaacggaattaacgtctttagacctaatgactttgatgtgatagatttcaacggtagtcctacactcgttgattttaaaatcttcaatcacagcgttgaggcagattccacatattcagcttatttcgacaaaagtgtaagttttacagagcacattgaattgccttataatttaaacactttctcattccagttcagctccctggattacagaagtccttataaggttggttacgaatatatgctcgaaggcgtagatgattcatggatttccacctccgcttttcatcgtgaggctttctacacaaagcttccttcaggcgaatatatgttcagactgagggtcaggaatagcgatggagtctacagtttgaatgaactttccatacctgtcattattaaccctcctttctggcgtacatggtatgcctatacactctattttatattgcttgtcttgtctttataccggttcaaggtgtattatacctcacgggtgcagcgcagaaatgctctatatatagcaaacatggaaaaacgcaagactgaagaacttcttgaaaaggagactacattttttaccaacatatcgcatgaattgaggacaccactcacacttattcattctccacttagtatgattattgaatcgggcaagtattcgtccgacaagtatcttgccggcatgctgcagacaatggagcataacagtaagttcctgttaagtcttgtcaaccagctgatgaacttctcaaagagcgagaaaggaatgcttagtctgaatctcaaatatggcaacttctcgtctttctcaaaagaagtatttcagcagttcacgtattgggcaaaacagaaaggtgtagggctggaatattctgtctcacgcagtgatataagctttctgttcgaccctcatcttatggaacagataatctataatctcgtatcgaatgccattaagcatactcctgccggaggatttgtatcgtttactgtcaatgaacaggataacaaaataaacatctctgtggcagactcgggaaacggaatatccgacaacctgaaaacacacctcttcgagcgtttctacagtcagaataaaaactctgctgaaggaggtaccggtataggtctgtttctgaccaagcggcttgtagagatacataatggaaatattacgtttgtatcagaggaaggtaaaggcactgttttccatgttgtaattcctatgataactgagggggacatggttacggagaatatctctgccaacagtggggaggatgaaaagtttgctgatgtgttaagaagtgaatcgtgcgagcatgaagagatgatagacatagaagtggacggagaatctccggctatattgattgttgatgacaataaggatatatgtaatatgttgtcattactgttgtcggataagtataagataatgatagcccatgatggggagatggcatggaacatgattccagatttgcaaccggatcttgttttatccgatataatgatgccgggcatgaatggtctggaactgtgtgagagaatcaagcaggatgtaaggacatctcatattcctgtagtattgctttcagccaagactacattgcaggattatttcatcggatataaattccatgcagatgcttattgccctaaacctttcgacaacaagataatgaaagagctgcttaattccattataaccaacaggaagcggattcttcaacacaagaaagttccggcaataaagatttccgaggtaagcactacatctaccgacgataagttccttgagaaacttgtaaagataatagaggacaacattacagactcttcgttccagatagaggatatatgtaaaggtcttggcgtgacggccttggttctgaacaagaagctgaaagcacttatgggagtaacagccaatgcttttgtacgttcaataagaatgaagagagcggcagaactgttgaaaacaggacggtattctgtatcagaggtgacatacgatgtagggttcaatgatttgaagtatttcagagaatgtttcaagaaagaattcggtgtattgccgcaacagtacaaagaacagagtatacagaccgatttggattcttaa

SEQ ID NO: 19 - protein, 1323 aa, Bacteroides ovatus
MFRLILSLISVLIIVCKSFASNEFVTRKYTTLDGLSQNDVQCIYQDSKGFIWLATNDGLNRFDGYEFKVYGYQSNGLNSNLIVCIDEDSHGNLWIGTADRGVFLFNSVKNEFVSLNLGHSGIDKNFTCDKILVDSKDRVWFHSSDESIYLVNYDFQNGKINTVLRSTLKLPYISDIIEIDNTIMLSSEDGLYECNVDGDELLLNKLLGCPIASAIVISSSQILYSNLENHQLCLYDKHTCKVSTLLENCDIRKMVYKNKRLFYATTSTVNVLTFDVLHAIESKPQVIATYSYSYPQTVVLDKNDILWIGFFKSGFMSIRENNKPIDLFRGIGNDHISSVYTFAKSDIYLGTEGSGLYHFNSITGNARLIPFTANRIVYSTAYSNYTDCMYVSLMYDGIYSFTSDNDYKKISGLRNVRAMLADGKYLWIGTYNKGLFRYDLSTGVMKEIKTSDNKELKIVRNIIKDHKGNIWVASSFGLKVLESADLYIDNPVLNSVKGLDELDYIVPVCEDLNHNIWYGTLGRGLRKIVDLDENHNACVENFSSADGLSSNTIKSIVNGTDGTLWISTNKGINSLNINTQRIRSYDIFDGLQDYEFMELSAGVMTDGTMIFGGVNGINVFRPNDFDVIDFNGSPTLVDFKIFNHSVEADSTYSAYFDKSVSFTEHIELPYNLNTFSFQFSSLDYRSPYKVGYEYMLEGVDDSWISTSAFHREAFYTKLPSGEYMFRLRVRNSDGVYSLNELSIPVIINPPFWRTWYAYTLYFILLVLSLYRFKVYYTSRVQRRNALYIANMEKRKTEELLEKETTFFTNISHELRTPLTLIHSPLSMIIESGKYSSDKYLAGMLQTMEHNSKFLLSLVNQLMNFSKSEKGMLSLNLKYGNFSSFSKEVFQQFTYWAKQKGVGLEYSVSRSDISFLFDPHLMEQIIYNLVSNAIKHTPAGGFVSFTVNEQDNKINISVADSGNGISDNLKTHLFERFYSQNKNSAEGGTGIGLFLTKRLVEIHNGNITFVSEEGKGTVFHVVIPMITEGDMVTENISANSGEDEKFADVLRSESCEHEEMIDIEVDGESPAILIVDDNKDICNMLSLLLSDKYKIMIAHDGEMAWNMIPDLQPDLVLSDIMMPGMNGLELCERIKQDVRTSHIPVVLLSAKTTLQDYFIGYKFHADAYCPKPFDNKIMKELLNSIITNRKRILQHKKVPAIKISEVSTTSTDDKFLEKLVKIIEDNITDSSFQIEDICKGLGVTALVLNKKLKALMGVTANAFVRSIRMKRAAELLKTGRYSVSEVTYDVGFNDLKYFRECFKKEFGVLPQQYKEQSIQTDLDS

SEQ ID NO: 20 - protein, 1032 aa, Bacteroides ovatus
MRNQKKWYHGRYMLFVMLIFYTLSMYSQKITVKGKVIDAANNLEVIGAAVQVEGTSLGTITDMDGNFVLQGVPTKGNLVFSFVGYKTVKAAIKNGQIYNIKLQEDTKVLDEVVVVGYGSMRKKEVTGAVARVNSDEITKISTSDLGTALQGMVAGVNVQASSGEPGAKSNIQIRGLSSISGDSSPLYVVDGVPFEGDPGLSSSEIASIDILKDAASAAIYGTRGASGVILITTKKGKEGEMKIAVDGYYGVQHITSNIHLLDANESIFVKVMSNRMMEGNQNTDDLAWSNLKTYPVNFFNNSSLYEYVVNNNAPIQNYSVTANGGKKDLTYNLTANYFDQKGVLINSDYKRYNIRSNTHFQRGKWTINTNIAMKIENQLSPAWGLLNECYDYSPTRSQIYPQASIVNAAGDPADLQGVSYTLGRLKEENHKDTESFNGNFYLAYNVIPGLNVSTRLGFGYNNQKAVSIRPEFEVYNQKGEKVTSSNYRSQLKDTHSKNTSLTWETMVNYNKKIKKHDIKFTGVFSMEKYTYEMFYASIMDLVTNEIPNLNAGTSDMTVGTGSGQWGQDRISTMVGMLGRLQYSYADKYMASASIRRDGSSKFSEENRWGLFPSLSVGWNISEESFFDRFRWLVNSLKLRFSYGTTGNQNFPDYSYAPAIYKNYDYTFGTGTSEILANGFTQLGFANPNVKWETTQQLNAGIDMALYNNKLILGLDLYKSNKKNMLFPMVVPPSNGGGQSSTVTLNAGDMENRGVEFSLTHRNKIRGVNYSLTGTFTKNVNEIVSMAGKNELYFFPDGKPVSSGSDYVTAIKKGYEAGAFFVMPTAGVINTEQKLAEYQKLQSSARMGDLMYIDTNNDGVLNDDDRVYAGSGMPDYELGLNFSADYRGFDFSMNWYASVGNEIINGTKIYTYQRRTNKELIYMWTPTNYTSTIPSYRTEGHNNYRAHTDMWIEDGSFVRLKNIMLGYSFPKSWVSKLGLGKFRLYVAADNLLTLTKYDGYDPEVGSNGLSRRGLDYGTYPISIQMRGGFQINF

SEQ ID NO: 21 - protein, 678 aa, Bacteroides ovatus
MNFRYKTIVFSLLMSGMTLVSCDDFLTQENIHQLTTQNFYKTIGDCEKGLAAVYNALKNTNIYHPLDENRRSDIAVEGNKDRKQFDNEAYKQTFNDSYGTVRGKWSALYTGVFRANQVLASIEKIRPNVTDEPQITKLAQIEAQAYSLRGLFYFYLNNSFNNGNVPYINEIAEVEEDYYKKVTPSDEIKKYYREDLQKALDLGLNDKWEKTDLGRITSWAVKAILGKSYLYDKEYNKAAEYFKDIIDNGGFALVDDIVDNFTAANEFNSESILEVSYSTQYNTEFGTWSESTLYNIWGMNVNGLGDAWLNTVPAFWLVEAFETEPVDRLDERNWIKMQSDNYGDPEHRDIIYDQLGTTFSSQVDRQGVVYNRTYVYTWDATAGKYVGVRERLVSTVGDNKVLYNKITGYDDIVPEFKWEDGQAYRLRSYSMRASASLAINGDESLIYYQSLPQQVSKFNRGSSAYFRKLSNWDTRKSETEFKPAMASGINYRLIRLADIYLMYAECLIKGGASDGNVQSAINAINKVRHRAGVVLIGKSEQGEFKRYTYDEKEYAASDVMNHLMYVERPLELCMEGHAIRVIDLRRWNITKERFDQLASDEYKYCMIQTKYLKPNPDDPNALVSAFNFGKQYRFYELPPEKRGNAFVDYFQASLNYGPQVAYWPIPNIEITSNPDINK

SEQ ID NO: 22 - DNA, 4107 bp, Bacteroides uniformis
atgaaaaaattttgtttattcttttgcataatatttacttgtataattaaggttttcccgcaatatgtaataaatggcgaagagtatgaattccgtaccaggaatttgcctcaaagtgaagtcaatgatataattcaggataagtatggttttatctggatagcaacacttgatggtctgtacagatatgacggttatgaatataaggcatatttgagtgacgggcaggaaggggctataagtacaaatatgattctgagtctggatattgacagctataataatctgtgggttggtacttatggacgcggattgtcacgttttgactacgaaacaggtgaatttataaattttcccattgagatacttataaacagaaaagatttaaaggggggggacattacagcggtaatggttgactcgcagaatgatatatggataggaatgaattatggtttgttaaagattaaattcgaccataaggaaaatattataacagaaagacatttttttgagttcgagggaaatgcttccagtgacgcaataaaggatatatatcaggatgtatatggtaatatttggattgctaggaatgcatatactgaactggtgacaggtataaaggatgataagctggtttcaaataaaattcacatctcaggcaatatcataactggtgataagagtgctattcttgtaggtggatctaaactgtttaaaatagaacctcatgacggtacttttgataacattactcctgtcctgctatacgataaacctgtatctgcactaataaaagattttgataatatttgggtggcaaatagaaggggtttggaatatctttcccaatcagaggataatgaaaattattcaactcaattcagtcttaataaggagtttgtcaaatctttgaatagcaataatgtgtcatgcttgatgactgactctgaaaacaatatatggattggaatcagaggtggaggactatactcactaaacaagaaagcacataagtttcagaattatatacccaaaggttttcataaagatccttccggtagaaaacagaagagtgaatgtatgcaggtccgtgcggtttttgaggactccgacggtaatttgtggttaggtgaagaagaagaaggggtgttcaggctctctgcagataaaaattataatgatttgtttcaagttgtaaatgtcaattcaaaatatgagaatagaggttatgcttttgaagaaacaaaactcaaaaatggtcgtaaactgatatgggtaggaacaagttttccggcaaatcttgttgcaatagataacaaaactgccgatattgtaaattactcttgtccttcatcacttaaaatgggcttcgtgttctcaatagaaaaaacttcggaaaatgttttgtggattgccacttacagtaatggagttttcagattacagcttgataacaatggaaatgttgtggattacagacatttcactatatataattctgatttatcttcgaatataatccgttctttgtattttgataataaatctaaaatatggataggtactgacagtggattgaattttattgatatcaatgatgaaaatctgaaagtaaaccgtataacattcagtggggatagtgactggttcaatcatctttatgttcttgatataaaggaatataatggaaaactgctgatgggctcaatgggtaatggattaatattatacgactatattaataacagttgcacaaaactgactacaaagaacgggctgcacaataattccattaaaactgtgctgacagatcaggataataatgtatgggtatcgagcaacaaaggtatttccagagtcaatctaacagataacagcattatccattatggaaaagataatggcatatccgaagaagaattcagtgaaatatgtggtgttaaacgtcataacggtgaacttgtatttggaagcagaaggggaattcttgtgttcaggggtaatgaaatagtgaaaaatgagagaaagccaaaagtctttataacagacatgctgactaatggtacatcattaaaatttaattccgagcacagtgagctggtactggattattatgacaggaatgtagcgttcagatttaccggactacagttgtccaatccaggaggattaaagtattactataagcttgaaggttttgacaacgaatggcagctaactaacagtactcagagaactgcaagatacaccaacttgcctgagggcgattatatatttattgtaaaagccagtaatgaagatggttttgttagcgaacatccagcccaattgagtttcaccgtaaagccaccatttgtacgtagcggactggcatactttatttatttcttactgtttgtcgtccttatgtatatatcttatttgatattaaaagctttctatagaaagaaaaaagaagtacttgcagcaaatcttgaggctaagcaggctgaagaaattacacaatacaagcttcagttctttacggacgtgtcgcatgagttcaggacacctctcactctcattgagatacctttggagtcggcaatcaataattgtggatctgacaagaaacaactttattatttgaccctcatacgccaaaatgtttccacattgaaaattcttataaatcagttgttggatttcagaaaaatagaacgtgggaagctacagtttaatccgtatccggttaatgtgtcagatgtggttggagatatttattcgaggtttaagtgtctctcagagagcaggaatataatatattctataaatactcctgaagaagctgcagtttcgatgatagatatttctttatttgagaaagtaattgtaaatgtaatttcaaatgcattcaaatataccccacaaggaggaagtataagtgtatatgtagcgaatgatgccaataccataacagtgtctgtacaggacacaggtgaaggtatttctgaggaagaactgtcgcatctgtttgagagattctatcaaggcaaggagcataataaactcaagcaggctggtacgggtatcggtctgtctatgtgtaagaatattattgatgttcatggaggaaatatcgaaattttcagtaaatcgggtgaaggaacaaaatgtaatattatactgaagagagaacttacagaacatgtgacattgagtgagattccatattatgatatattaaggaaagacactctatcgcttattgacgacgaattatcgtctatggatttttcgaataatgaagttaaacaggagactaaccagtcggaggattcagaacttcataaactgactttactgattgtagaggataatgaccagatgagaaatgtggttgccgagaatctttcttccgattttgaagtcattactgctggaaacggaaaggaaggtcttgaaaaatgtaaggagttttatcctaatctgataattacagatatacgcatgccgataatgaatggtattgacatgtgtattgagataaagaaagatgaggagataagccatattccgattatagtactaacagctaataattctgtcaagaacagactggacagttataatctggctaatgttgattcatatcttgaaaaaccttttgaaatgtccactttgcgtggggtaataaaaagtatattggccaatagagccagattgcaggagcaatactcaaaaaatgctattatatctcctgaaaaggttgccagtacaaagactgacctcaattttatgaccgagattattaatattattaaaagggaaatgagtaatccggagttaagtgtagaactgattgccgatgagtatggtgtttcgcgaacatatttaaacaggaaaatcaaggctattacaggagacacaactttgaaatttatacgtaatataagattcaaatatgcggctcagttacttcagtctggcgagaagaatgtctccgagactgcgtgggagattggttataatgatgtcaatactttcagacttaggtttaaggaaatgtttggtgtaactcctacatcatatttaaaaggaaaatcagaggatgagagaccgtaa

SEQ ID NO: 23 - protein, 1368 aa, Bacteroides uniformis
MKKFCLFFCIIFTCIIKVFPQYVINGEEYEFRTRNLPQSEVNDIIQDKYGFIWIATLDGLYRYDGYEYKAYLSDGQEGAISTNMILSLDIDSYNNLWVGTYGRGLSRFDYETGEFINFPIEILINRKDLKGGDITAVMVDSQNDIWIGMNYGLLKIKFDHKENIITERHFFEFEGNASSDAIKDIYQDVYGNIWIARNAYTELVTGIKDDKLVSNKIHISGNIITGDKSAILVGGSKLFKIEPHDGTFDNITPVLLYDKPVSALIKDFDNIWVANRRGLEYLSQSEDNENYSTQFSLNKEFVKSLNSNNVSCLMTDSENNIWIGIRGGGLYSLNKKAHKFQNYIPKGFHKDPSGRKQKSECMQVRAVFEDSDGNLWLGEEEEGVFRLSADKNYNDLFQVVNVNSKYENRGYAFEETKLKNGRKLIWVGTSFPANLVAIDNKTADIVNYSCPSSLKMGFVFSIEKTSENVLWIATYSNGVFRLQLDNNGNVVDYRHFTIYNSDLSSNIIRSLYFDNKSKIWIGTDSGLNFIDINDENLKVNRITFSGDSDWFNHLYVLDIKEYNGKLLMGSMGNGLILYDYINNSCTKLTTKNGLHNNSIKTVLTDQDNNVWVSSNKGISRVNLTDNSIIHYGKDNGISEEEFSEICGVKRHNGELVFGSRRGILVFRGNEIVKNERKPKVFITDMLTNGTSLKFNSEHSELVLDYYDRNVAFRFTGLQLSNPGGLKYYYKLEGFDNEWQLTNSTQRTARYTNLPEGDYIFIVKASNEDGFVSEHPAQLSFTVKPPFVRSGLAYFIYFLLFVVLMYISYLILKAFYRKKKEVLAANLEAKQAEEITQYKLQFFTDVSHEFRTPLTLIEIPLESAINNCGSDKKQLYYLTLIRQNVSTLKILINQLLDFRKIERGKLQFNPYPVNVSDVVGDIYSRFKCLSESRNIIYSINTPEEAAVSMIDISLFEKVIVNVISNAFKYTPQGGSISVYVANDANTITVSVQDTGEGISEEELSHLFERFYQGKEHNKLKQAGTGIGLSMCKNIIDVHGGNIEIFSKSGEGTKCNIILKRELTEHVTLSEIPYYDILRKDTLSLIDDELSSMDFSNNEVKQETNQSEDSELHKLTLLIVEDNDQMRNVVAENLSSDFEVITAGNGKEGLEKCKEFYPNLIITDIRMPIMNGIDMCIEIKKDEEISHIPIIVLTANNSVKNRLDSYNLANVDSYLEKPFEMSTLRGVIKSILANRARLQEQYSKNAIISPEKVASTKTDLNFMTEIINIIKREMSNPELSVELIADEYGVSRTYLNRKIKAITGDTTLKFIRNIRFKYAAQLLQSGEKNVSETAWEIGYNDVNTFRLRFKEMFGVTPTSYLKGKSEDERP

SEQ ID NO: 24 - DNA, 2319 bp, Bacteroides vulgatus
atggagcggtcaggaaatttctataaggcaatacagttgggatatatacttatctccattcttatcggatgtatggcatataatagcctctatgaatggcaggagatagaagcattagaacttggcaataaaaaaatagacgagctccgaaaagaaataaacaatatcaatattcaaatgataaaattttctctattgggtgaaacaatactggaatggaacgataaagatatcgagcattaccatgcacggcgtatggcaatggacagtatgctctgccgtttcaaggccacctatccagcagagcgcatcgatagtgtgcgcagtcttttagaggataaggaacgacagatgttccagatagtccggttaatggatgaacaacaatctattaacaagaagatagccaatcaaattccggttattgtgcagaaaagtgtgcaggaacagtccaaaaagccaaaacgaaaaggtttcttgggcatctttggcaaaaaagagggaacgaagccaacgacaacaacgactacgctccgttcatccaatagaaacatggtcaacgaacagaaagcgcagagccgtcgattgtcagaacaagccgatagtcttgctgcccgtaatgcagaacttaacagacaactgcaaggattgatttgccaaatcgaaaagaaggtacaatctgatttacaaaatagagaaagcgagataacagcgatgcgtaaaaaatcatttatgcagataggcggcttgatgggatttgttcttttgctgttggtcatttcctatatcatcatacaccgtgatgcaaagaacattaaacgatacaaacgcaagacaacggatttgatcgagcaattggaacagtccgtgcaacaaaatgaggtactcataacctcccgaaagaaagcggtacatactattacccatgagttgcgtacaccactgacggcaataactggctataccgaacttttgcggaaagaatgcaatagcggtaataatgggcaatatatccgaaatatactgcaatcctccgaccgtatgcgggatatgctcaacactttgcttgacttcttccgcctggacaacggcaaggaacagccccgtctgtcaccctgccggatttctgcaatcacgcacacacttgaaacggagttcattcctgttgcagtgaacaaagggttgtccttgtccgtgaagactggacacgatgccattgtattgaccgacaaagagcgaataatacaaatcgggaataacctgctgtcaaacgcagtcaagttcacagaagaaggcggtgtttctttgattactgaatatgataatggagttctgacactggtcgttgaagatacaggtacaggcatgacagaagaggaacagaaacaagcgttcggtgcgtttgaacgtctatcaaatgccgccgcaaaggagggtttcgggcttgggcttgccataatgcgtaatattgtgtcgatgcttggcggaacaatccgtttggacagcaagaaagggaaaggcagtcgtttcacagttgaaatttctatgcaggaagctgaagaacagcttggatatacaagcaatacacctgtttatcataacaataaattccatgatgttgtcgccattgacaatgatgaggtattacttctgatgctgaaagagatgtactcccaagaaggaatacactgcgacacttgcaccgatgctgcggaactgatggaaatgatacgccagaaagaatacagcctgttgctgacagacttgaatatgcccggtataaacggtttcgaattactggaactgttgcgttcgtccaacgtgggcaattcaccaacaatcccggtggttgtggcaaccgcttcgggcagttgtaacaaaggggaactattggcaaaaggctttgccggatgcctgttcaagccgttctccatatcggagttgatggaggtttccgacaggtgtgccataaaagaaacaccggacgggaaaccggatttttcagctttgctgtcttacggcaatgaagccgttatgctggaaaagttgatgacggaaactgaaaaagagatgcagacaatacgggaagcggcaacagaaaaagacctgcaaaagctggattccctgacacaccacctgcgcagctcgtgggaggtgctacgtgccgaccaaccgctaaatgtactttacagattgcttcatggcgatgtactcccggatggtgaagcgttaagccatgccgtgactgccgtgctggataagggagcggaaataatccggttggcagaagaggaaaggagaaaatacgaagatggataa

SEQ ID NO: 25 - protein, 772 aa, Bacteroides vulgatus
MERSGNFYKAIQLGYILISILIGCMAYNSLYEWQEIEALELGNKKIDELRKEINNINIQMIKFSLLGETILEWNDKDIEHYHARRMAMDSMLCRFKATYPAERIDSVRSLLEDKERQMFQIVRLMDEQQSINKKIANQIPVIVQKSVQEQSKKPKRKGFLGIFGKKEGTKPTTTTTTLRSSNRNMVNEQKAQSRRLSEQADSLAARNAELNRQLQGLICQIEKKVQSDLQNRESEITAMRKKSFMQIGGLMGFVLLLLVISYIIIHRDAKNIKRYKRKTTDLIEQLEQSVQQNEVLITSRKKAVHTITHELRTPLTAITGYTELLRKECNSGNNGQYIRNILQSSDRMRDMLNTLLDFFRLDNGKEQPRLSPCRISAITHTLETEFIPVAVNKGLSLSVKTGHDAIVLTDKERIIQIGNNLLSNAVKFTEEGGVSLITEYDNGVLTLVVEDTGTGMTEEEQKQAFGAFERLSNAAAKEGFGLGLAIMRNIVSMLGGTIRLDSKKGKGSRFTVEISMQEAEEQLGYTSNTPVYHNNKFHDVVAIDNDEVLLLMLKEMYSQEGIHCDTCTDAAELMEMIRQKEYSLLLTDLNMPGINGFELLELLRSSNVGNSPTIPVVVATASGSCNKGELLAKGFAGCLFKPFSISELMEVSDRCAIKETPDGKPDFSALLSYGNEAVMLEKLMTETEKEMQTIREAATEKDLQKLDSLTHHLRSSWEVLRADQPLNVLYRLLHGDVLPDGEALSHAVTAVLDKGAEIIRLAEEERRKYEDG

SEQ ID NO: 26 - DNA, 5832 bp, Artificial Sequence
  P_por10-driven luciferase reporter construct
gggtcggtcctggtattggaacagctttcgcattgagaaattcaagaaatgaaagcggggaaatggtgaacagaaccatgtatgccgaatcggcaggaattactcaggtgtccctgaatgtgatttataaacttcggattatggaatatgaaatcccgttgacggtgatgacgtattggaatccgaaatccaaccagggatttttctacacaggaatgcagttcaatctgttttgattttttatagagtttggggtgactttttatctcctttatgaggggtaaaaatgtcgaaaaagagggggtataatatcccctctttcttttttgaaaatctcctctattgttttgatggatacttcatactttagcatcgtcgaaaagataaagacagtgacatgtaatactaacatattaatatcaataatatccctgagctgtcaccggatgtgctttccggtctgatgagtccgtgaggacgaaacagcctctacaaataattttgtttaatccatcaatttaaaatttaaaataatggtttttactctggaagattttgttggcgattggcgtcagaccgcgggttataatttggatcaagtcctggaacagggtggcgtaagctctctgttccagaacctgggtgtgagcgtgacgccgattcagcgcatcgttctgtccggcgagaacggtctgaaaattgatattcatgtgatcatcccgtacgaaggcctgagcggtgaccaaatgggtcaaatcgagaaaatctttaaagtcgtctacccagttgacgatcaccacttcaaggttatcttgcattacggtacgctggtgattgatggtgtgaccccgaatatgattgactatttcggccgtccgtatgaaggcattgccgtttttgacggtaaaaagatcaccgtcaccggtaccctgtggaatggcaataagattattgacgagcgtctgattaacccggacggcagcctgctgttccgcgtgaccatcaacggtgtcacgggttggcgtctgtgcgagcgcatcctggcataaggttcctagctgattagaaggccatcctgacggatggccttttttttgactagcggccgcgcgggattaaaagtcggggattggtgaacaaaaaggtgtttctctctttaagagaaatatcgttttgctaaacagttgatattgaggtatcattttatcgtaaaagacatttttgctcaacaattgcttgacggaaatcaacaaattttagcattttgtaaaaaagtcgctatataatttggtgaattggagttattttcatatttttgcatcccgaagagtttctcttaaagagagaaacatcttttgcataccttttccgaccgaatttttatgtcgtaaagaggggctttgcagggggtggactcagaaagatgagaatagatgactattgtagttgaaacacatagaaagttgctgatatacagaccgatacgcatatcgggatgaaccatgagtacgttcttttctcaaaaaacataaatattcgaaaagagatgcaataaattaaggagaggttataatgaacaaagtaaatataaaagatagtcaaaattttattacttcaaaatatcacatagaaaaaataatgaattgcataagtttagatgaaaaagataacatctttgaaataggtgcagggaaaggtcattttactgctggattggtaaagagatgtaattttgtaacggcgatagaaattgattctaaattatgtgaggtaactcgtaataagctcttaaattatcctaactatcaaatagtaaatgatgatatactgaaatttacatttcctagccacaatccatataaaatatttggcagcataccttacaacataagcacaaatataattcgaaaaattgtttttgaaagttcagccacaataagttatttaatagtggaatatggttttgctaaaatgttattagatacaaacagatcactagcattgctgttaatggcagaggtagatatttctatattagcaaaaattcctaggtattatttccatccaaaacctaaagtggatagcacattaattgtattaaaaagaaagccagcaaaaatggcatttaaagagagaaaaaaatatgaaacttttgtaatgaaatgggttaacaaagagtacgaaaaactgtttacaaaaaatcaatttaataaagctttaaaacatgcgagaatatatgatataaacaatattagtttcgaacaatttgtatcgctatttaatagttataaaatatttaacggctaaaaacaataggccacatgcaactgtaaatgtttacgcgggtaccgacaccgcggtggaggggaattcccatgtcagccgttaagtgttcctgtgtcactcaaaattgctttgagaggctctaagggcttctcagtgcgttacatccctggcttgttgtccacaaccgttaaaccttaaaagctttaaaagccttatatattcttttttttcttataaaacttaaaaccttagaggctatttaagttgctgatttatattaattttattgttcaaacatgagagcttagtacgtgaaacatgagagcttagtacgttagccatgagagcttagtacgttagccatgagggtttagttcgttaaacatgagagcttagtacgttaaacatgagagcttagtacgtgaaacatgagagcttagtacgtactatcaacaggttgaactgctgatcttcagatcctctacgccggacgcatcgtggccggatcaattccgttttccgctgcataaccctgcttcggggtcattatagcgattttttcggtatatccatcctttttcgcacgatatacaggattttgccaaagggttcgtgtagactttccttggtgtatccaacggcgtcagccgggcaggataggtgaagtaggcccacccgcgagcgggtgttccttcttcactgtcccttattcgcacctggcggtgctcaacgggaatcctgctctgcgaggctggccggctaccgccggcgtaacagatgagggcaagcggatggctgatgaaaccaagccaaccaggaagggcagcccacctatcagtcattggtaactatctatgaaactgtttgatacttttatagttgattaaacttgttcatggcatttgccttaatatcatccgctatgtcaatgtagggtttcatagctttgtagtcgctgtgtcccgtccatttcatgaccacctgtgccgggattccgagagccagcgcattgcagatgaatgtcctttttcctgcatgggtactgagcaaagcgtatttgggtgtgacttcatcaatacgttcatttcccttgtagtaggtttcccgtacaggctcgttgatttctgccagttcgcccagctctttcaggtaatcgttcatcttctggttgctgatgacgggcagagccatgtaattctcgaaatggatgtccttgtatttgtccagtatggctttgctgtatttgttcagttcaatcgtcaggctgtcggcagtcttgactgtggttatttcgatgtggtcggacttcacatcgcttcttttcagattgcgaacatccgaataccgcaaactcgtaaagcagcagaacaggaaaacatcacgcacacgttccaggtattgcttatccttgggtatctggtagtctttcagcttgttcagttcatcccaagtcaggaagattacttttttcgaggtggttttcagtttcggtttgaacgtatcgtatgcaatgttctgatgatgtcctttcttgaagctccagcgcaggaaccatttgaggaatcccatttgcttgccgatggtgctgtttctcatatccttggtgtcacgcaggaagttgacgtattcgttcaatccaaactcgttgaaatagttgaacgttgcatcctccttgaactctttgaggtggttcctcactgctgcaaatttttcataggtggatgccgtccagttattctggttaccgcactcttttacaaactcatcgaacacctcccaaaagctgacaggggcttcttccggctgttcttcactggtatctttcattctcatgttgaaagcttccttcaactgttgggtcgttggcatgacctcctgcacctcaaattccttgaaaatattctggatttcggcatagtatttcagcaagtccgtattgatttcggctgcactttgctttagcttgttggtacatccgttctttacccgctgcttatctgcatcccatttggctacgtcaatccggtagcccgttgtaaactcgatacgttggctggcaaagatgacacgcatacggatgggtacgttctctacgattggcacaccgttctttttccggctctccaatgcaaaaatgatgttgcgcttgatattcataattgggtgcgtttgaaattctacacccaaatatacacccaattattgagatagcaaaagacatttagaaacatttacttttactctatattgtaatttacacttgattatcagtcgtttgcagtcttatgatattctgtgaaagtataagttcgagagcctgtctctccgcaaaaaacgctgaaaatcagcagattgcaaaacaaacaccctgttttacacccaagaatgtaaagtcgggtgtttttgttttatttaagataatacaaccactacataataaaagagtagcgatattaaaagaatccgatgagaaaagactaatatttatctatccattcagtttgatttctcaggactttacatcgtcctgaaagtatttgttgtgttacaaccaattaaccaattctgattagaaaaactcatcgagcatcaaatgaaactgcaatttattcatatcaggattatcaataccatatttttgaaaaagccgtttctgtaatgaaggagaaaactcaccgaggcagttccataggatggcaagatcctggtatcggtctgcgattccgactcgtccaacatcaatacaacctattaatttcccctcgtcaaaaataaggttatcaagtgagaaatcaccatgagtgacgactgaatccggtgagaatggcaaaagcttatgcatttctttccagacttgttcaacaggccagccattacgctcgtcatcaaaatcactcgcatcaaccaaaccgttattcattcgtgattgcgcctgagcgaggcgaaatacgcgatcgctgttaaaaggacaattacaaacaggaatcgaatgcaaccggcgcaggaacactgccagcgcatcaacaatattttcacctgaatcaggatattcttctaatacctggaatgctgttttcccggggatcgcagtggtgagtaaccatgcatcatcaggagtacggataaaatgcttgatggtcggaagaggcataaattccgtcagccagtttagtctgaccatctcatctgtaacatcattggcaacgctacctttgccatgtttcagaaacaactctggcgcatcgggcttcccatacaatcgatagattgtcgcacctgattgcccgacattatcgcgagcccatttatacccatataaatcagcatccatgttggaatttaatcgcggcctggagcaagacgtttcccgttgaatatggctcataacaccccttgtattactgtttatgtaagcagacagttttattgttcatgatgatatatttttatcttgtgcaatgtaacatcagagattttgagacacaacgtggctttgttgaataaatcgaacttttgctgagttgaaggatcagggcgcgccagtag

SEQ ID NO: 27 - DNA, 10080 bp, Artificial Sequence
  P_por10 luciferase reporter construct including HTCS
gggtcggtcctggtattggaacagctttcgcattgagaaattcaagaaatgaaagcggggaaatggtgaacagaaccatgtatgccgaatcggcaggaattactcaggtgtccctgaatgtgatttataaacttcggattatggaatatgaaatcccgttgacggtgatgacgtattggaatccgaaatccaaccagggatttttctacacaggaatgcagttcaatctgttttgattttttatagagtttggggtgactttttatctcctttatgaggggtaaaaatgtcgaaaaagagggggtataatatcccctctttcttttttgaaaatctcctctattgttttgatggatacttcatactttagcatcgtcgaaaagataaagacagtgacatgtaatactaacatattaatatcaataatatccctgagctgtcaccggatgtgctttccggtctgatgagtccgtgaggacgaaacagcctctacaaataattttgtttaatccatcaatttaaaatttaaaataatggtttttactctggaagattttgttggcgattggcgtcagaccgcgggttataatttggatcaagtcctggaacagggtggcgtaagctctctgttccagaacctgggtgtgagcgtgacgccgattcagcgcatcgttctgtccggcgagaacggtctgaaaattgatattcatgtgatcatcccgtacgaaggcctgagcggtgaccaaatgggtcaaatcgagaaaatctttaaagtcgtctacccagttgacgatcaccacttcaaggttatcttgcattacggtacgctggtgattgatggtgtgaccccgaatatgattgactatttcggccgtccgtatgaaggcattgccgtttttgacggtaaaaagatcaccgtcaccggtaccctgtggaatggcaataagattattgacgagcgtctgattaacccggacggcagcctgctgttccgcgtgaccatcaacggtgtcacgggttggcgtctgtgcgagcgcatcctggcataaggttcctagctgattagaaggccatcctgacggatggccttttttttgactgccagtaggtctttttaagaacaatcccaatacagtctgttactgtaatttctttcgggcatcgtatctattattgagtgtaatggtacgatgctttttttgttttatactatgaaatgaagttaaagatttatttttttcttgattgattttgatacgcattctaaagtggaaaatatctataattatctattaactactgtaaatacttgatgttttagataaaatcaataactttgtaatcttgatgaaatataaagaataatagttatatgtttagattaatcttaagtttaatatcagttctgattatagtttgcaaatcctttgcatccaatgagtttgtcacaagaaagtacactactcttgatggactttcccaaaatgatgtgcaatgtatttatcaagactcaaaaggctttatatggttggccacgaacgacggactgaacaggtttgacggatatgaatttaaggtttacggatatcagtcaaacggtcttaacagtaatctgatagtatgtattgacgaagattcacatggaaatctgtggataggtacagccgatagaggagtgttcctgttcaattctgtaaagaacgaattcgtttcattaaatcttggtcacagcggtattgataaaaatttcacttgcgataagattcttgtcgactctaaagacagagtctggtttcattcctctgatgaaagtatataccttgtaaattatgattttcaaaatggcaaaataaatactgtcttaagatcaacattaaaattaccatacatttccgacatcatagaaatagataatacgataatgctctcctccgaagacggcctgtacgaatgtaacgtcgatggagatgaattactgcttaacaaactattgggatgccctatagcttcagccatagtcatctcatcttctcaaatattgtactcaaatctggaaaatcatcaattatgtttatacgacaagcatacctgcaaggtaagtaccctgttggaaaactgtgatatacgaaaaatggtatataaaaacaaaagattattttatgccactacaagcactgtgaatgtgttgacttttgatgtattgcatgccatcgagtcaaaaccacaggttattgctacatattcttacagctatccgcaaactgtagttcttgataaaaacgatattctttggataggatttttcaagagtggctttatgagtatacgcgaaaataataaacctatagatttattcagaggaataggaaatgatcatatatcgtccgtttatacatttgccaaatctgatatatatttaggcacagaaggctcagggctatatcattttaattccattaccggtaatgccagacttattcctttcacggcaaacaggatagtatactcaacagcatactcaaactacaccgactgcatgtatgtgtctctgatgtacgatggtatttacagtttcacttctgataatgattataaaaagatctcaggtttgagaaatgtgcgcgcaatgcttgccgatggaaaatatttgtggattggcacatataataaaggtcttttcagatatgatttgtccacaggtgtgatgaaggaaatcaaaacatctgacaataaagaacttaagatagtaagaaacatcattaaagatcataagggtaatatatgggtagcttccagcttcggtcttaaagtattggaatctgcagatttgtatatagataatcctgttttgaactcagtcaagggacttgatgaactcgactatatagtgcctgtatgtgaagacttgaatcataatatctggtatggaacacttggacgtgggttaaggaaaatcgtggatttggatgaaaaccataatgcctgcgttgaaaattttagctctgcagacgggttgagcagcaatacaataaaatcaattgttaatggcacggatggaacattatggatttctaccaataaaggaattaattcgttgaatatcaacacacagagaataagatcttatgatattttcgatggtcttcaggattatgaatttatggaactttctgctggagtaatgacggatggaacaatgatattcggtggcgtaaacggaattaacgtctttagacctaatgactttgatgtgatagatttcaacggtagtcctacactcgttgattttaaaatcttcaatcacagcgttgaggcagattccacatattcagcttatttcgacaaaagtgtaagttttacagagcacattgaattgccttataatttaaacactttctcattccagttcagctccctggattacagaagtccttataaggttggttacgaatatatgctcgaaggcgtagatgattcatggatttccacctccgcttttcatcgtgaggctttctacacaaagcttccttcaggcgaatatatgttcagactgagggtcaggaatagcgatggagtctacagtttgaatgaactttccatacctgtcattattaaccctcctttctggcgtacatggtatgcctatacactctattttatattgcttgtcttgtctttataccggttcaaggtgtattatacctcacgggtgcagcgcagaaatgctctatatatagcaaacatggaaaaacgcaagactgaagaacttcttgaaaaggagactacattttttaccaacatatcgcatgaattgaggacaccactcacacttattcattctccacttagtatgattattgaatcgggcaagtattcgtccgacaagtatcttgccggcatgctgcagacaatggagcataacagtaagttcctgttaagtcttgtcaaccagctgatgaacttctcaaagagcgagaaaggaatgcttagtctgaatctcaaatatggcaacttctcgtctttctcaaaagaagtatttcagcagttcacgtattgggcaaaacagaaaggtgtagggctggaatattctgtctcacgcagtgatataagctttctgttcgaccctcatcttatggaacagataatctataatctcgtatcgaatgccattaagcatactcctgccggaggatttgtatcgtttactgtcaatgaacaggataacaaaataaacatctctgtggcagactcgggaaacggaatatccgacaacctgaaaacacacctcttcgagcgtttctacagtcagaataaaaactctgctgaaggaggtaccggtataggtctgtttctgaccaagcggcttgtagagatacataatggaaatattacgtttgtatcagaggaaggtaaaggcactgttttccatgttgtaattcctatgataactgagggggacatggttacggagaatatctctgccaacagtggggaggatgaaaagtttgctgatgtgttaagaagtgaatcgtgcgagcatgaagagatgatagacatagaagtggacggagaatctccggctatattgattgttgatgacaataaggatatatgtaatatgttgtcattactgttgtcggataagtataagataatgatagcccatgatggggagatggcatggaacatgattccagatttgcaaccggatcttgttttatccgatataatgatgccgggcatgaatggtctggaactgtgtgagagaatcaagcaggatgtaaggacatctcatattcctgtagtattgctttcagccaagactacattgcaggattatttcatcggatataaattccatgcagatgcttattgccctaaacctttcgacaacaagataatgaaagagctgcttaattccattataaccaacaggaagcggattcttcaacacaagaaagttccggcaataaagatttccgaggtaagcactacatctaccgacgataagttccttgagaaacttgtaaagataatagaggacaacattacagactcttcgttccagatagaggatatatgtaaaggtcttggcgtgacggccttggttctgaacaagaagctgaaagcacttatgggagtaacagccaatgcttttgtacgttcaataagaatgaagagagcggcagaactgttgaagacaggacggtattctgtatcagaggtgacatacgatgtagggttcaatgatttgaagtatttcagagaatgtttcaagaaagaattcggtgtattgccgcaacagtacaaagaacagagtatacagaccgatttggattcttaagactagcggccgcgcgggattaaaagtcggggattggtgaacaaaaaggtgtttctctctttaagagaaatatcgttttgctaaacagttgatattgaggtatcattttatcgtaaaagacatttttgctcaacaattgcttgacggaaatcaacaaattttagcattttgtaaaaaagtcgctatataatttggtgaattggagttattttcatatttttgcatcccgaagagtttctcttaaagagagaaacatcttttgcataccttttccgaccgaatttttatgtcgtaaagaggggctttgcagggggtggactcagaaagatgagaatagatgactattgtagttgaaacacatagaaagttgctgatatacagaccgatacgcatatcgggatgaaccatgagtacgttcttttctcaaaaaacataaatattcgaaaagagatgcaataaattaaggagaggttataatgaacaaagtaaatataaaagatagtcaaaattttattacttcaaaatatcacatagaaaaaataatgaattgcataagtttagatgaaaaagataacatctttgaaataggtgcagggaaaggtcattttactgctggattggtaaagagatgtaattttgtaacggcgatagaaattgattctaaattatgtgaggtaactcgtaataagctcttaaattatcctaactatcaaatagtaaatgatgatatactgaaatttacatttcctagccacaatccatataaaatatttggcagcataccttacaacataagcacaaatataattcgaaaaattgtttttgaaagttcagccacaataagttatttaatagtggaatatggttttgctaaaatgttattagatacaaacagatcactagcattgctgttaatggcagaggtagatatttctatattagcaaaaattcctaggtattatttccatccaaaacctaaagtggatagcacattaattgtattaaaaagaaagccagcaaaaatggcatttaaagagagaaaaaaatatgaaacttttgtaatgaaatgggttaacaaagagtacgaaaaactgtttacaaaaaatcaatttaataaagctttaaaacatgcgagaatatatgatataaacaatattagtttcgaacaatttgtatcgctatttaatagttataaaatatttaacggctaaaaacaataggccacatgcaactgtaaatgtttacgcgggtaccgacaccgcggtggaggggaattcccatgtcagccgttaagtgttcctgtgtcactcaaaattgctttgagaggctctaagggcttctcagtgcgttacatccctggcttgttgtccacaaccgttaaaccttaaaagctttaaaagccttatatattcttttttttcttataaaacttaaaaccttagaggctatttaagttgctgatttatattaattttattgttcaaacatgagagcttagtacgtgaaacatgagagcttagtacgttagccatgagagcttagtacgttagccatgagggtttagttcgttaaacatgagagcttagtacgttaaacatgagagcttagtacgtgaaacatgagagcttagtacgtactatcaacaggttgaactgctgatcttcagatcctctacgccggacgcatcgtggccggatcaattccgttttccgctgcataaccctgcttcggggtcattatagcgattttttcggtatatccatcctttttcgcacgatatacaggattttgccaaagggttcgtgtagactttccttggtgtatccaacggcgtcagccgggcaggataggtgaagtaggcccacccgcgagcgggtgttccttcttcactgtcccttattcgcacctggcggtgctcaacgggaatcctgctctgcgaggctggccggctaccgccggcgtaacagatgagggcaagcggatggctgatgaaaccaagccaaccaggaagggcagcccacctatcagtcattggtaactatctatgaaactgtttgatacttttatagttgattaaacttgttcatggcatttgccttaatatcatccgctatgtcaatgtagggtttcatagctttgtagtcgctgtgtcccgtccatttcatgaccacctgtgccgggattccgagagccagcgcattgcagatgaatgtcctttttcctgcatgggtactgagcaaagcgtatttgggtgtgacttcatcaatacgttcatttcccttgtagtaggtttcccgtacaggctcgttgatttctgccagttcgcccagctctttcaggtaatcgttcatcttctggttgctgatgacgggcagagccatgtaattctcgaaatggatgtccttgtatttgtccagtatggctttgctgtatttgttcagttcaatcgtcaggctgtcggcagtcttgactgtggttatttcgatgtggtcggacttcacatcgcttcttttcagattgcgaacatccgaataccgcaaactcgtaaagcagcagaacaggaaaacatcacgcacacgttccaggtattgcttatccttgggtatctggtagtctttcagcttgttcagttcatcccaagtcaggaagattacttttttcgaggtggttttcagtttcggtttgaacgtatcgtatgcaatgttctgatgatgtcctttcttgaagctccagcgcaggaaccatttgaggaatcccatttgcttgccgatggtgctgtttctcatatccttggtgtcacgcaggaagttgacgtattcgttcaatccaaactcgttgaaatagttgaacgttgcatcctccttgaactctttgaggtggttcctcactgctgcaaatttttcataggtggatgccgtccagttattctggttaccgcactcttttacaaactcatcgaacacctcccaaaagctgacaggggcttcttccggctgttcttcactggtatctttcattctcatgttgaaagcttccttcaactgttgggtcgttggcatgacctcctgcacctcaaattccttgaaaatattctggatttcggcatagtatttcagcaagtccgtattgatttcggctgcactttgctttagcttgttggtacatccgttctttacccgctgcttatctgcatcccatttggctacgtcaatccggtagcccgttgtaaactcgatacgttggctggcaaagatgacacgcatacggatgggtacgttctctacgattggcacaccgttctttttccggctctccaatgcaaaaatgatgttgcgcttgatattcataattgggtgcgtttgaaattctacacccaaatatacacccaattattgagatagcaaaagacatttagaaacatttacttttactctatattgtaatttacacttgattatcagtcgtttgcagtcttatgatattctgtgaaagtataagttcgagagcctgtctctccgcaaaaaacgctgaaaatcagcagattgcaaaacaaacaccctgttttacacccaagaatgtaaagtcgggtgtttttgttttatttaagataatacaaccactacataataaaagagtagcgatattaaaagaatccgatgagaaaagactaatatttatctatccattcagtttgatttctcaggactttacatcgtcctgaaagtatttgttgtgttacaaccaattaaccaattctgattagaaaaactcatcgagcatcaaatgaaactgcaatttattcatatcaggattatcaataccatatttttgaaaaagccgtttctgtaatgaaggagaaaactcaccgaggcagttccataggatggcaagatcctggtatcggtctgcgattccgactcgtccaacatcaatacaacctattaatttcccctcgtcaaaaataaggttatcaagtgagaaatcaccatgagtgacgactgaatccggtgagaatggcaaaagcttatgcatttctttccagacttgttcaacaggccagccattacgctcgtcatcaaaatcactcgcatcaaccaaaccgttattcattcgtgattgcgcctgagcgaggcgaaatacgcgatcgctgttaaaaggacaattacaaacaggaatcgaatgcaaccggcgcaggaacactgccagcgcatcaacaatattttcacctgaatcaggatattcttctaatacctggaatgctgttttcccggggatcgcagtggtgagtaaccatgcatcatcaggagtacggataaaatgcttgatggtcggaagaggcataaattccgtcagccagtttagtctgaccatctcatctgtaacatcattggcaacgctacctttgccatgtttcagaaacaactctggcgcatcgggcttcccatacaatcgatagattgtcgcacctgattgcccgacattatcgcgagcccatttatacccatataaatcagcatccatgttggaatttaatcgcggcctggagcaagacgtttcccgttgaatatggctcataacaccccttgtattactgtttatgtaagcagacagttttattgttcatgatgatatatttttatcttgtgcaatgtaacatcagagattttgagacacaacgtggctttgttgaataaatcgaacttttgctgagttgaaggatcagggcgcgccagtag

SEQ ID NO: 28 - protein, 264 aa, Bacteroides ovatus
MKQYLDLLNRVLTEGTEKSDRTGTGTISVFGHQMRFNLDDGFPCLTTKKLHLKSIIYELLWFLQGDTNVKYLQEHGVRIWNEWADENGDLGHIYGYQWRSWPDYNGGFIDQISEVVETIKHNPDSRRIIVSAWNVADLNHMNLPPCHAFFQFYVADGRLSLQLYQRSADIFLGVPFNIASYALLLQMMAQVTGLKAGDFVHTFGDAHIYLNHLEQVKLQLSREPRPLPQMKINPDVKSIFDFKFEDFELVNYDPHPHIAGIVAV

SEQ ID NO: 29 - DNA, 7148 bp, Artificial Sequence
  ThyA knockout plasmid
aaattctaaatacaaggctattcttgctgttcttgaacagtgagaagtatcaatatgactttatacctgagtagttacaaaaaggatttattttgttaaagaatgataaatctaccctaactagcaaaggagcccaaacttagatatcgtatctttgttcttctgtaaactaaaagagtgagaagagttttgaaattacgtatatttattttatttctgttcctgcctatattgagtgttcaggcaggtatcatcgacagtctgatgatacatcccagggactcaatcggattaaccagcgattcccttgtgctacgctatttacaagaatcgggaatccctatatctgataataataaggtaaaactgctaaaaagcggacgggagaagtttatcgatttgtttgaagccatccgggaagctaaacaccacgtccatctggaatatttcaacttccgaaatgactccatcgccaatgctttatttgccctgctggccgaaaaagtgaaagaaggggtcgaagtacgagctatgttcgatgcattcggaaactggtcgaacaacaaaccacttaaaaagaaacatctcaagaaaatacgtgaacaaggaatcgagattgtcaagttcgatccgttcactttcccttatatcaatcacgctgcccatcgcgatcaccggaaaatagctgtcatcgatggaaaagtggcttataccggtggtatgaatatcgctgactactacattaacggactacccaaaatcggaacctggcgtgatatgcacacacgcattgaaggggatgccgtcaatgatctgcaggagatattcctaacgatctggaataaggaaaccaagcagaatgtaggtggagccgcttatttcccccaacatgaggaacaaacggacagtacgaatattgtggtagcaatcgtagaccgtaccccgaaaaagaatagccgtatgttaagccacgcttatgccatgagcatctattcggcccaaaagaatgttcatatcgtcaatccttattttgtaccgacttcttctatcaaaaaggcgttgaaccggacaatcgaccgaggcgtaaatgttacaatcatggtttcttctgcctccgatatcccgtttactccggatgccgcactttataagttgcacaaactgatgaaaagaggagctactgtctatatgtataacggtggatttcatcactctaaaataatgatggtggatgatttgttctgtacagttggcactgccaacctgaacagccgcagcttgcgctatgattacgaaactaatgcctttatctttgatacccaaataacgggtgaattaaatacaatgttccgggatgatattgagcattgcactcaattgacgcctgaattctggaaaaagcgctccccgtggaagaagttcgtcggctggtttgctaatttattcactccatttttgtaattttgtgcggagaatcattttcaccacaacttattcattgcaggaatagtagccgtgtaactttatgagtaaaatatctatcattgctgccgtagaccgccgtatggctatcggcttcgagaacaaacttcttttctggttacccaatgatttgaaacgtttcaaagcattaactaccggaaacaccatactgatgggacgcaaaactttcgagtcactaccgaaaggcgcattacccaatcgcagaaacatcgttttatcttccaacccggctacagaatgtcccggtgcggaagttttcccttcactcgaagcagctttgcaaagttgtaaagaggaggaacacatttatattataggaggagcaagtatttatcagcaggccctttctttcgctgacgaactttgcctgacagaaatagatgatatggctcccgaagccgacgcctattttccggaagtatcgccagagatgtggcaagaaaaaagcagagaagctcatcctgcggatgagaaacatctctgctcctatgcttttgttgattacgtgagaaaataacgattaatcttcatcttctatgtcgaccatgattggcatctgccgcttaatggcttcatggaaggagattaatgtctcggtacgcgccaaacccaatggttgcaacttatcgtgaataatactcaataagtgatggttattctttgcgtaaattttgataaacatatcgtattttccggtagtgaaatgacattccaccacttcggggatagcttctaaagcttttgttaccgaatcaaaggattcgggatctttcagatatataccaatataagcgcaagtctcatatccgattttctcggggtcgatgacatattccgaaccttttaatatacctaaattagtaagcttctgaatacgctgatggattgcagcgccggaaacattacatgctcgtgctacttccaaaaaaggaatacgcgcattccctgcaatcagtttcagaatttgctcatctaaagcatctaattgatgatgtcccatttttgaatcaaattgtttttatcaatgaatcttttatgcaaagttagcgatttttcgacaacaaatactataatctattacttttatttgcagaaagcggataagtcaacaatagttcgtacctttgcgaaaaacataaatataccattaatatgaaacatatttgctgtattattctgtgtttctgtacttctataggaagttatgcacagaattttgctgattattttcagaacaaaacattgcgagtggattatatctttaccggggatgctacacaacaggctatttatctggatgagctatcacaacttcctacctgggcaggacgtcaacatcatctttcggaacttccattggaaggcaacggacaaattatagtgaaagaccttgccagcaaacagtgtatctacaaaacgtcattctcttctttgtttcaagagtggctgtccacagacgaagctaaagaaacagccaaaggatttgagaatactttcaaacagcggccgcgcgggattaaaagtcggggattggtgaacaaaaaggtgtttctctctttaagagaaatatcgttttgctaaacagttgatattgaggtatcattttatcgtaaaagacatttttgctcaacaattgcttgacggaaatcaacaaattttagcattttgtaaaaaagtcgctatataatttggtgaattggagttattttcatatttttgcatcccgaagagtttctcttaaagagagaaacatcttttgcataccttttccgaccgaatttttatgtcgtaaagaggggctttgcagggggtggactcagaaagatgagaatagatgactattgtagttgaaacacatagaaagttgctgatatacagaccgatacgcatatcgggatgaaccatgagtacgttcttttctcaaaaaacataaatattcgaaaagagatgcaataaattaaggagaggttataatgaacaaagtaaatataaaagatagtcaaaattttattacttcaaaatatcacatagaaaaaataatgaattgcataagtttagatgaaaaagataacatctttgaaataggtgcagggaaaggtcattttactgctggattggtaaagagatgtaattttgtaacggcgatagaaattgattctaaattatgtgaggtaactcgtaataagctcttaaattatcctaactatcaaatagtaaatgatgatatactgaaatttacatttcctagccacaatccatataaaatatttggcagcataccttacaacataagcacaaatataattcgaaaaattgtttttgaaagttcagccacaataagttatttaatagtggaatatggttttgctaaaatgttattagatacaaacagatcactagcattgctgttaatggcagaggtagatatttctatattagcaaaaattcctaggtattatttccatccaaaacctaaagtggatagcacattaattgtattaaaaagaaagccagcaaaaatggcatttaaagagagaaaaaaatatgaaacttttgtaatgaaatgggttaacaaagagtacgaaaaactgtttacaaaaaatcaatttaataaagctttaaaacatgcgagaatatatgatataaacaatattagtttcgaacaatttgtatcgctatttaatagttataaaatatttaacggctaaaaacaataggccacatgcaactgtaaatgtttacgcgggtaccgacaccgcggtggaggggaattcccatgtcagccgttaagtgttcctgtgtcactcaaaattgctttgagaggctctaagggcttctcagtgcgttacatccctggcttgttgtccacaaccgttaaaccttaaaagctttaaaagccttatatattcttttttttcttataaaacttaaaaccttagaggctatttaagttgctgatttatattaattttattgttcaaacatgagagcttagtacgtgaaacatgagagcttagtacgttagccatgagagcttagtacgttagccatgagggtttagttcgttaaacatgagagcttagtacgttaaacatgagagcttagtacgtgaaacatgagagcttagtacgtactatcaacaggttgaactgctgatcttcagatcctctacgccggacgcatcgtggccggatcaattccgttttccgctgcataaccctgcttcggggtcattatagcgattttttcggtatatccatcctttttcgcacgatatacaggattttgccaaagggttcgtgtagactttccttggtgtatccaacggcgtcagccgggcaggataggtgaagtaggcccacccgcgagcgggtgttccttcttcactgtcccttattcgcacctggcggtgctcaacgggaatcctgctctgcgaggctggccggctaccgccggcgtaacagatgagggcaagcggatggctgatgaaaccaagccaaccaggaagggcagcccacctatcatatgttttaaatagagtttatatcttctgtccgtcctctccccgtgcacggaggtagcactccctgcaaagcggctcgtattcggctgtctctcctagaagtacctgcttgtcattcttgacggtacgatgagagaaagatgccagatcaccgcacttcacgcagatcgcatgaactttggaaacttcatcggcaatggcacataattgaggcatcggtccgaagggattccctttaaagtccatatccagtccggcgatgatgacacggatgccgttattggcaagctgcctgcatacgtcaatcagtccgtcatcaaagaactgtgcttcgtcgatgccgactacatctatttcagaagtgaacaacaggatactagccgatgaatcgataggggtggacgcgatggaatgactgtcgtgtgataccacatcttcttccgaataacgggtgtcgatggccggtttgaatatctctacacgctggcgtgcgaacttggctctcttcatcctacgaatcaattcctccgtctttccggagaacattgaaccgcagattacctctattctacctcttcttctggtttcttgtatgtgatcttctgaaaataataccatgtgatttttgtgctttcttgattaaataaatgagtggacaaaggtaaacaattcgatgtacaagaactgttaaattatccattattttaagttattgcataaattattcctacattcgcaccataataacaatggatggaaatgaaacagaagctattaacagatattgagctggatgttcatgagctgaagctactcatgaatacgttttctaaagagccgactcagactttgtctgaactgttgaagcggagcatcctacgtatgcaggagcgtttggaacagttgtcggaagagataagtgctgtgccggtggaagcctcgccttctcctgtagcggaagcggaaagtgaagcccccattgttgaagaacaagcccctgtaatagaggaagttgaatgtccggtgatagaagagaaggtcgtggaagagaatgaagcgacagcaccgggagaagatgaacctgtgatagtacaggaaccgcagactgttgtggaagagtgttacaaccaattaaccaattctgattagaaaaactcatcgagcatcaaatgaaactgcaatttattcatatcaggattatcaataccatatttttgaaaaagccgtttctgtaatgaaggagaaaactcaccgaggcagttccataggatggcaagatcctggtatcggtctgcgattccgactcgtccaacatcaatacaacctattaatttcccctcgtcaaaaataaggttatcaagtgagaaatcaccatgagtgacgactgaatccggtgagaatggcaaaagcttatgcatttctttccagacttgttcaacaggccagccattacgctcgtcatcaaaatcactcgcatcaaccaaaccgttattcattcgtgattgcgcctgagcgaggcgaaatacgcgatcgctgttaaaaggacaattacaaacaggaatcgaatgcaaccggcgcaggaacactgccagcgcatcaacaatattttcacctgaatcaggatattcttctaatacctggaatgctgttttcccggggatcgcagtggtgagtaaccatgcatcatcaggagtacggataaaatgcttgatggtcggaagaggcataaattccgtcagccagtttagtctgaccatctcatctgtaacatcattggcaacgctacctttgccatgtttcagaaacaactctggcgcatcgggcttcccatacaatcgatagattgtcgcacctgattgcccgacattatcgcgagcccatttatacccatataaatcagcatccatgttggaatttaatcgcggcctggagcaagacgtttcccgttgaatatggctcataacaccccttgtattactgtttatgtaagcagacagttttattgttcatgatgatatatttttatcttgtgcaatgtaacatcagagattttgagacacaacgtggctttgttgaataaatcgaacttttgctgagttgaaggatcagggcgcgccatcaa

SEQ ID NO: 30 - DNA, 6711 bp, Artificial Sequence
  P_por10 driven thyA-luciferase plasmid with degenerate ribosome binding site
  misc_feature (554)..(561): n is a, c, g, or t
  misc_feature (573)..(573): n is a, c, g, or t
gataaaacgaaaggctcagtcgaaagactgggcctttcgttttgggtcggtcctggtattggaacagctttcgcattgagaaattcaagaaatgaaagcggggaaatggtgaacagaaccatgtatgccgaatcggcaggaattactcaggtgtccctgaatgtgatttataaacttcggattatggaatatgaaatcccgttgacggtgatgacgtattggaatccgaaatccaaccagggatttttctacacaggaatgcagttcaatctgttttgattttttatagagtttggggtgactttttatctcctttatgaggggtaaaaatgtcgaaaaagagggggtataatatcccctctttcttttttgaaaatctcctctattgttttgatggatacttcatactttagcatcgtcgaaaagataaagacagtgacatgtaatactaacatattaatatcaataatatccctgagctgtcaccggatgtgctttccggtctgatgagtccgtgaggacgaaacagcctctacaaataattttgtttaacnnnnnnnnwwwaaawwtwanaaaatgttttgtgcggagaatcattttcaccacaacttattcattatgaaacaatatctggatttactcaatcgtgtactaaccgaaggtacagaaaaaagtgaccgtaccggaaccggaaccatcagcgttttcggtcatcaaatgcgttttaatcttgatgacggtttcccgtgcctgacaaccaaaaaactacatctgaaatcaatcatatacgaattgctttggtttctgcaaggtgatactaatgtgaaatatcttcaggaacatggagtgcgtatctggaacgaatgggcggatgaaaacggcgacttaggacatatttatggttatcaatggcgttcatggcctgactataacggtggatttatcgaccagatcagtgaagtggtggaaacaatcaaacataatccggattcgcgccgtatcattgtaagcgcttggaacgtagcggacctgaatcatatgaatttacctccctgccatgctttctttcagttttatgtagcagacggacggttaagcctgcaactatatcaacgcagcgctgatattttccttggcgttccttttaatattgcttcatacgcattattgctgcaaatgatggcacaagtgacgggattgaaagccggagatttcgtccatacctttggtgatgcgcatatctacctgaaccacttggaacaagtgaagctccaattatcacgggaacctcgtccattgccacaaatgaagatcaatccggatgtgaaaagtatcttcgacttcaaatttgaggactttgaattagtgaactatgatccgcatccgcatattgcaggaatagtagccgtgggttccggatcgggctcagtttttactctggaagattttgttggcgattggcgtcagaccgcgggttataatttggatcaagtcctggaacagggtggcgtaagctctctgttccagaacctgggtgtgagcgtgacgccgattcagcgcatcgttctgtccggcgagaacggtctgaaaattgatattcatgtgatcatcccgtacgaaggcctgagcggtgaccaaatgggtcaaatcgagaaaatctttaaagtcgtctacccagttgacgatcaccacttcaaggttatcttgcattacggtacgctggtgattgatggtgtgaccccgaatatgattgactatttcggccgtccgtatgaaggcattgccgtttttgacggtaaaaagatcaccgtcaccggtaccctgtggaatggcaataagattattgacgagcgtctgattaacccggacggcagcctgctgttccgcgtgaccatcaacggtgtcacgggttggcgtctgtgcgagcgcatcctggcataatgcgaaggccatcctgacggatggccttttttttgactagcggccgcgcgggattaaaagtcggggattggtgaacaaaaaggtgtttctctctttaagagaaatatcgttttgctaaacagttgatattgaggtatcattttatcgtaaaagacatttttgctcaacaattgcttgacggaaatcaacaaattttagcattttgtaaaaaagtcgctatataatttggtgaattggagttattttcatatttttgcatcccgaagagtttctcttaaagagagaaacatcttttgcataccttttccgaccgaatttttatgtcgtaaagaggggctttgcagggggtggactcagaaagatgagaatagatgactattgtagttgaaacacatagaaagttgctgatatacagaccgatacgcatatcgggatgaaccatgagtacgttcttttctcaaaaaacataaatattcgaaaagagatgcaataaattaaggagaggttataatgaacaaagtaaatataaaagatagtcaaaattttattacttcaaaatatcacatagaaaaaataatgaattgcataagtttagatgaaaaagataacatctttgaaataggtgcagggaaaggtcattttactgctggattggtaaagagatgtaattttgtaacggcgatagaaattgattctaaattatgtgaggtaactcgtaataagctcttaaattatcctaactatcaaatagtaaatgatgatatactgaaatttacatttcctagccacaatccatataaaatatttggcagcataccttacaacataagcacaaatataattcgaaaaattgtttttgaaagttcagccacaataagttatttaatagtggaatatggttttgctaaaatgttattagatacaaacagatcactagcattgctgttaatggcagaggtagatatttctatattagcaaaaattcctaggtattatttccatccaaaacctaaagtggatagcacattaattgtattaaaaagaaagccagcaaaaatggcatttaaagagagaaaaaaatatgaaacttttgtaatgaaatgggttaacaaagagtacgaaaaactgtttacaaaaaatcaatttaataaagctttaaaacatgcgagaatatatgatataaacaatattagtttcgaacaatttgtatcgctatttaatagttataaaatatttaacggctaaaaacaataggccacatgcaactgtaaatgtttacgcgggtaccgacaccgcggtggaggggaattcccatgtcagccgttaagtgttcctgtgtcactcaaaattgctttgagaggctctaagggcttctcagtgcgttacatccctggcttgttgtccacaaccgttaaaccttaaaagctttaaaagccttatatattcttttttttcttataaaacttaaaaccttagaggctatttaagttgctgatttatattaattttattgttcaaacatgagagcttagtacgtgaaacatgagagcttagtacgttagccatgagagcttagtacgttagccatgagggtttagttcgttaaacatgagagcttagtacgttaaacatgagagcttagtacgtgaaacatgagagcttagtacgtactatcaacaggttgaactgctgatcttcagatcctctacgccggacgcatcgtggccggatcaattccgttttccgctgcataaccctgcttcggggtcattatagcgattttttcggtatatccatcctttttcgcacgatatacaggattttgccaaagggttcgtgtagactttccttggtgtatccaacggcgtcagccgggcaggataggtgaagtaggcccacccgcgagcgggtgttccttcttcactgtcccttattcgcacctggcggtgctcaacgggaatcctgctctgcgaggctggccggctaccgccggcgtaacagatgagggcaagcggatggctgatgaaaccaagccaaccaggaagggcagcccacctatcagtcattggtaactatctatgaaactgtttgatacttttatagttgattaaacttgttcatggcatttgccttaatatcatccgctatgtcaatgtagggtttcatagctttgtagtcgctgtgtcccgtccatttcatgaccacctgtgccgggattccgagagccagcgcattgcagatgaatgtcctttttcctgcatgggtactgagcaaagcgtatttgggtgtgacttcatcaatacgttcatttcccttgtagtaggtttcccgtacaggctcgttgatttctgccagttcgcccagctctttcaggtaatcgttcatcttctggttgctgatgacgggcagagccatgtaattctcgaaatggatgtccttgtatttgtccagtatggctttgctgtatttgttcagttcaatcgtcaggctgtcggcagtcttgactgtggttatttcgatgtggtcggacttcacatcgcttcttttcagattgcgaacatccgaataccgcaaactcgtaaagcagcagaacaggaaaacatcacgcacacgttccaggtattgcttatccttgggtatctggtagtctttcagcttgttcagttcatcccaagtcaggaagattacttttttcgaggtggttttcagtttcggtttgaacgtatcgtatgcaatgttctgatgatgtcctttcttgaagctccagcgcaggaaccatttgaggaatcccatttgcttgccgatggtgctgtttctcatatccttggtgtcacgcaggaagttgacgtattcgttcaatccaaactcgttgaaatagttgaacgttgcatcctccttgaactctttgaggtggttcctcactgctgcaaatttttcataggtggatgccgtccagttattctggttaccgcactcttttacaaactcatcgaacacctcccaaaagctgacaggggcttcttccggctgttcttcactggtatctttcattctcatgttgaaagcttccttcaactgttgggtcgttggcatgacctcctgcacctcaaattccttgaaaatattctggatttcggcatagtatttcagcaagtccgtattgatttcggctgcactttgctttagcttgttggtacatccgttctttacccgctgcttatctgcatcccatttggctacgtcaatccggtagcccgttgtaaactcgatacgttggctggcaaagatgacacgcatacggatgggtacgttctctacgattggcacaccgttctttttccggctctccaatgcaaaaatgatgttgcgcttgatattcataattgggtgcgtttgaaattctacacccaaatatacacccaattattgagatagcaaaagacatttagaaacatttacttttactctatattgtaatttacacttgattatcagtcgtttgcagtcttatgatattctgtgaaagtataagttcgagagcctgtctctccgcaaaaaacgctgaaaatcagcagattgcaaaacaaacaccctgttttacacccaagaatgtaaagtcgggtgtttttgttttatttaagataatacaaccactacataataaaagagtagcgatattaaaagaatccgatgagaaaagactaatatttatctatccattcagtttgatttctcaggactttacatcgtcctgaaagtatttgttgtgttacaaccaattaaccaattctgattagaaaaactcatcgagcatcaaatgaaactgcaatttattcatatcaggattatcaataccatatttttgaaaaagccgtttctgtaatgaaggagaaaactcaccgaggcagttccataggatggcaagatcctggtatcggtctgcgattccgactcgtccaacatcaatacaacctattaatttcccctcgtcaaaaataaggttatcaagtgagaaatcaccatgagtgacgactgaatccggtgagaatggcaaaagcttatgcatttctttccagacttgttcaacaggccagccattacgctcgtcatcaaaatcactcgcatcaaccaaaccgttattcattcgtgattgcgcctgagcgaggcgaaatacgcgatcgctgttaaaaggacaattacaaacaggaatcgaatgcaaccggcgcaggaacactgccagcgcatcaacaatattttcacctgaatcaggatattcttctaatacctggaatgctgttttcccggggatcgcagtggtgagtaaccatgcatcatcaggagtacggataaaatgcttgatggtcggaagaggcataaattccgtcagccagtttagtctgaccatctcatctgtaacatcattggcaacgctacctttgccatgtttcagaaacaactctggcgcatcgggcttcccatacaatcgatagattgtcgcacctgattgcccgacattatcgcgagcccatttatacccatataaatcagcatccatgttggaatttaatcgcggcctggagcaagacgtttcccgttgaatatggctcataacaccccttgtattactgtttatgtaagcagacagttttattgttcatgatgatatatttttatcttgtgcaatgtaacatcagagattttgagacacaacgtggctttgttgaataaatcgaacttttgctgagttgaaggatcagggcgcgccagtag

SEQ ID NO: 31 - DNA, 6711 bp, Artificial Sequence
  P_por10 driven thyA-luciferase plasmid
gataaaacgaaaggctcagtcgaaagactgggcctttcgttttgggtcggtcctggtattggaacagctttcgcattgagaaattcaagaaatgaaagcggggaaatggtgaacagaaccatgtatgccgaatcggcaggaattactcaggtgtccctgaatgtgatttataaacttcggattatggaatatgaaatcccgttgacggtgatgacgtattggaatccgaaatccaaccagggatttttctacacaggaatgcagttcaatctgttttgattttttatagagtttggggtgactttttatctcctttatgaggggtaaaaatgtcgaaaaagagggggtataatatcccctctttcttttttgaaaatctcctctattgttttgatggatacttcatactttagcatcgtcgaaaagataaagacagtgacatgtaatactaacatattaatatcaataatatccctgagctgtcaccggatgtgctttccggtctgatgagtccgtgaggacgaaacagcctctacaaataattttgtttaacaccgcaaatttaaatattagaaaatgttttgtgcggagaatcattttcaccacaacttattcattatgaaacaatatctggatttactcaatcgtgtactaaccgaaggtacagaaaaaagtgaccgtaccggaaccggaaccatcagcgttttcggtcatcaaatgcgttttaatcttgatgacggtttcccgtgcctgacaaccaaaaaactacatctgaaatcaatcatatacgaattgctttggtttctgcaaggtgatactaatgtgaaatatcttcaggaacatggagtgcgtatctggaacgaatgggcggatgaaaacggcgacttaggacatatttatggttatcaatggcgttcatggcctgactataacggtggatttatcgaccagatcagtgaagtggtggaaacaatcaaacataatccggattcgcgccgtatcattgtaagcgcttggaacgtagcggacctgaatcatatgaatttacctccctgccatgctttctttcagttttatgtagcagacggacggttaagcctgcaactatatcaacgcagcgctgatattttccttggcgttccttttaatattgcttcatacgcattattgctgcaaatgatggcacaagtgacgggattgaaagccggagatttcgtccatacctttggtgatgcgcatatctacctgaaccacttggaacaagtgaagctccaattatcacgggaacctcgtccattgccacaaatgaagatcaatccggatgtgaaaagtatcttcgacttcaaatttgaggactttgaattagtgaactatgatccgcatccgcatattgcaggaatagtagccgtgggttccggatcgggctcagtttttactctggaagattttgttggcgattggcgtcagaccgcgggttataatttggatcaagtcctggaacagggtggcgtaagctctctgttccagaacctgggtgtgagcgtgacgccgattcagcgcatcgttctgtccggcgagaacggtctgaaaattgatattcatgtgatcatcccgtacgaaggcctgagcggtgaccaaatgggtcaaatcgagaaaatctttaaagtcgtctacccagttgacgatcaccacttcaaggttatcttgcattacggtacgctggtgattgatggtgtgaccccgaatatgattgactatttcggccgtccgtatgaaggcattgccgtttttgacggtaaaaagatcaccgtcaccggtaccctgtggaatggcaataagattattgacgagcgtctgattaacccggacggcagcctgctgttccgcgtgaccatcaacggtgtcacgggttggcgtctgtgcgagcgcatcctggcataatgcgaaggccatcctgacggatggccttttttttgactagcggccgcgcgggattaaaagtcggggattggtgaacaaaaaggtgtttctctctttaagagaaatatcgttttgctaaacagttgatattgaggtatcattttatcgtaaaagacatttttgctcaacaattgcttgacggaaatcaacaaattttagcattttgtaaaaaagtcgctatataatttggtgaattggagttattttcatatttttgcatcccgaagagtttctcttaaagagagaaacatcttttgcataccttttccgaccgaatttttatgtcgtaaagaggggctttgcagggggtggactcagaaagatgagaatagatgactattgtagttgaaacacatagaaagttgctgatatacagaccgatacgcatatcgggatgaaccatgagtacgttcttttctcaaaaaacataaatattcgaaaagagatgcaataaattaaggagaggttataatgaacaaagtaaatataaaagatagtcaaaattttattacttcaaaatatcacatagaaaaaataatgaattgcataagtttagatgaaaaagataacatctttgaaataggtgcagggaaaggtcattttactgctggattggtaaagagatgtaattttgtaacggcgatagaaattgattctaaattatgtgaggtaactcgtaataagctcttaaattatcctaactatcaaatagtaaatgatgatatactgaaatttacatttcctagccacaatccatataaaatatttggcagcataccttacaacataagcacaaatataattcgaaaaattgtttttgaaagttcagccacaataagttatttaatagtggaatatggttttgctaaaatgttattagatacaaacagatcactagcattgctgttaatggcagaggtagatatttctatattagcaaaaattcctaggtattatttccatccaaaacctaaagtggatagcacattaattgtattaaaaagaaagccagcaaaaatggcatttaaagagagaaaaaaatatgaaacttttgtaatgaaatgggttaacaaagagtacgaaaaactgtttacaaaaaatcaatttaataaagctttaaaacatgcgagaatatatgatataaacaatattagtttcgaacaatttgtatcgctatttaatagttataaaatatttaacggctaaaaacaataggccacatgcaactgtaaatgtttacgcgggtaccgacaccgcggtggaggggaattcccatgtcagccgttaagtgttcctgtgtcactcaaaattgctttgagaggctctaagggcttctcagtgcgttacatccctggcttgttgtccacaaccgttaaaccttaaaagctttaaaagccttatatattcttttttttcttataaaacttaaaaccttagaggctatttaagttgctgatttatattaattttattgttcaaacatgagagcttagtacgtgaaacatgagagcttagtacgttagccatgagagcttagtacgttagccatgagggtttagttcgttaaacatgagagcttagtacgttaaacatgagagcttagtacgtgaaacatgagagcttagtacgtactatcaacaggttgaactgctgatcttcagatcctctacgccggacgcatcgtggccggatcaattccgttttccgctgcataaccctgcttcggggtcattatagcgattttttcggtatatccatcctttttcgcacgatatacaggattttgccaaagggttcgtgtagactttccttggtgtatccaacggcgtcagccgggcaggataggtgaagtaggcccacccgcgagcgggtgttccttcttcactgtcccttattcgcacctggcggtgctcaacgggaatcctgctctgcgaggctggccggctaccgccggcgtaacagatgagggcaagcggatggctgatgaaaccaagccaaccaggaagggcagcccacctatcagtcattggtaactatctatgaaactgtttgatacttttatagttgattaaacttgttcatggcatttgccttaatatcatccgctatgtcaatgtagggtttcatagctttgtagtcgctgtgtcccgtccatttcatgaccacctgtgccgggattccgagagccagcgcattgcagatgaatgtcctttttcctgcatgggtactgagcaaagcgtatttgggtgtgacttcatcaatacgttcatttcccttgtagtaggtttcccgtacaggctcgttgatttctgccagttcgcccagctctttcaggtaatcgttcatcttctggttgctgatgacgggcagagccatgtaattctcgaaatggatgtccttgtatttgtccagtatggctttgctgtatttgttcagttcaatcgtcaggctgtcggcagtcttgactgtggttatttcgatgtggtcggacttcacatcgcttcttttcagattgcgaacatccgaataccgcaaactcgtaaagcagcagaacaggaaaacatcacgcacacgttccaggtattgcttatccttgggtatctggtagtctttcagcttgttcagttcatcccaagtcaggaagattacttttttcgaggtggttttcagtttcggtttgaacgtatcgtatgcaatgttctgatgatgtcctttcttgaagctccagcgcaggaaccatttgaggaatcccatttgcttgccgatggtgctgtttctcatatccttggtgtcacgcaggaagttgacgtattcgttcaatccaaactcgttgaaatagttgaacgttgcatcctccttgaactctttgaggtggttcctcactgctgcaaatttttcataggtggatgccgtccagttattctggttaccgcactcttttacaaactcatcgaacacctcccaaaagctgacaggggcttcttccggctgttcttcactggtatctttcattctcatgttgaaagcttccttcaactgttgggtcgttggcatgacctcctgcacctcaaattccttgaaaatattctggatttcggcatagtatttcagcaagtccgtattgatttcggctgcactttgctttagcttgttggtacatccgttctttacccgctgcttatctgcatcccatttggctacgtcaatccggtagcccgttgtaaactcgatacgttggctggcaaagatgacacgcatacggatgggtacgttctctacgattggcacaccgttctttttccggctctccaatgcaaaaatgatgttgcgcttgatattcataattgggtgcgtttgaaattctacacccaaatatacacccaattattgagatagcaaaagacatttagaaacatttacttttactctatattgtaatttacacttgattatcagtcgtttgcagtcttatgatattctgtgaaagtataagttcgagagcctgtctctccgcaaaaaacgctgaaaatcagcagattgcaaaacaaacaccctgttttacacccaagaatgtaaagtcgggtgtttttgttttatttaagataatacaaccactacataataaaagagtagcgatattaaaagaatccgatgagaaaagactaatatttatctatccattcagtttgatttctcaggactttacatcgtcctgaaagtatttgttgtgttacaaccaattaaccaattctgattagaaaaactcatcgagcatcaaatgaaactgcaatttattcatatcaggattatcaataccatatttttgaaaaagccgtttctgtaatgaaggagaaaactcaccgaggcagttccataggatggcaagatcctggtatcggtctgcgattccgactcgtccaacatcaatacaacctattaatttcccctcgtcaaaaataaggttatcaagtgagaaatcaccatgagtgacgactgaatccggtgagaatggcaaaagcttatgcatttctttccagacttgttcaacaggccagccattacgctcgtcatcaaaatcactcgcatcaaccaaaccgttattcattcgtgattgcgcctgagcgaggcgaaatacgcgatcgctgttaaaaggacaattacaaacaggaatcgaatgcaaccggcgcaggaacactgccagcgcatcaacaatattttcacctgaatcaggatattcttctaatacctggaatgctgttttcccggggatcgcagtggtgagtaaccatgcatcatcaggagtacggataaaatgcttgatggtcggaagaggcataaattccgtcagccagtttagtctgaccatctcatctgtaacatcattggcaacgctacctttgccatgtttcagaaacaactctggcgcatcgggcttcccatacaatcgatagattgtcgcacctgattgcccgacattatcgcgagcccatttatacccatataaatcagcatccatgttggaatttaatcgcggcctggagcaagacgtttcccgttgaatatggctcataacaccccttgtattactgtttatgtaagcagacagttttattgttcatgatgatatatttttatcttgtgcaatgtaacatcagagattttgagacacaacgtggctttgttgaataaatcgaacttttgctgagttgaaggatcagggcgcgccagtag

SEQ ID NO: 32 - DNA, 10059 bp, Artificial Sequence
  Ppor10-argS biocontainment plasmid
aatatagaagaaaaactcaccacgtccattatcagcgctatcaaaacgttgtacggacaggatgtacccggaaaaatggtacaactgcaaaagactaagaaagagtttgaaggacatcttactttggttgttttcccttttctgaaaatgtctaagaaggggcctgaacagaccgcacaggaaataggcggatacctgaaagagcatgctcccgaattggtttcagcctacaatgcagtgaagggctttcttaatttgacaattgcttcggattgttggattgaacttttgaattctattcaggctgctcccgaatacggtattgaaaaggctacggaaaactctccgttggtgatgattgagtattcttctcccaatacaaacaagccgcttcatctggggcacgtccgtaataacctgttgggaaatgccttggcaaatgtcatggcggcaaatggcaataaggtggtcaagaccaatattgtgaatgaccgtggtatccatatctgtaagtccatgctggcctggttgaaatatggtaacggtgaaacacctgaatcatcgggtaagaagggggaccatttgattggtgactattatgtagcttttgacaagcattacaaggctgaggtaaaggaactgacagctcagtaccaggctgaaggcttgaatgaagaagaagctaaggctaaggcagaggcaaactctcctctgatgctggaagctcgcgagatgctccgtaagtgggaggcgaatgaccctgagatccgtgccttgtggaagaagatgaatgactgggtatatgccggattcgatgaaacgtataagatgatgggagttagtttcgataaaatttattatgaatcgaatacctatctggaaggtaaggagaaagtgatggaaggactggaaaaaggtttcttctaccggaaagaggataactctgtatgggctgatttgactgccgaaggactggaccataagttgcttcttcgcggtgacggtacttctgtttatatgacccaggatatcggtactgccaaattacgttttcaggattaccccatcaacaagatgatttatgtagtgggtaatgaacaaaactatcatttccaggtactttctatcttgctcgacaaattgggttttgaatggggcaaaggattggttcatttctcatacggtatggtagagctgcccgagggcaaaatgaaaagtcgtgaaggtacagtagtggatgcggatgatttgatggaagcaatgattgaaactgctaaggaaacttctgctgaattaggtaaattggacggtctgacccaagaagaagccgacaatattgcccgtattgttggtttgggtgctttgaaatattttatcctgaaggtggacgcacgtaagaatatgactttcaacccgaaagaatcgatagatttcaatggcaatacaggacctttcattcagtatacgtatgcccgtatccagtctgtattacgcaaaaaacggcgcgcctgataggtgggctgcccttcctggttggcttggtttcatcagccatccgcttgccctcatctgttacgccggcggtagccggccagcctcgcagagcaggattcccgttgagcaccgccaggtgcgaataagggacagtgaagaaggaacacccgctcgcgggtgggcctacttcacctatcctgcccggctgacgccgttggatacaccaaggaaagtctacacgaaccctttggcaaaatcctgtatatcgtgcgaaaaaggatggatataccgaaaaaatcgctataatgaccccgaagcagggttatgcagcggaaaagttatatacattcatgtccatttatgtaaaaaatcctgctgaccttgtttatgtcttgtcagtcaccatttgcaaaaccatatttgaccctcaaagaggctgaatttgataagcaacttgctacatactcataataaggagctaaatagaacacgaatgggaaatactcaaatgccaaactaaagaagatattggccaaaataaacgctataccgagagagaaacttgatttttcaacttcctaaaacagtgttgttcaaacatttctacttatttgtacttaccagttgaacctacgtttccctaataaaatgtctatggtaaaaagttaaaaaatcctcctacttttgttagatatatttttttgtgtaattttgtaatcgttatgcggcagtaataatatacatattaatacgagttaggaatcctgtagttctcatatgctacgaggaggtattaaaaggtgcgtttcgacaatgcatctattgtagtatattattgcttaatccaaatgaatattataaatttaggaattcttgctcacattgatgcaggaaaaacttccgtaaccgagaatctgctgtttgccagtggagcaacggaaaagtgcggctgtgtggataatggtgacaccataacggactctatggatatagagaaacgtagaggaattactgttcgggcttctacgacatctattatctggaatggtgtgaaatgcaatatcattgacactccgggacacatggattttattgcggaagtggagcggacattcaaaatgcttgatggagcagtcctcatcttatccgcaaaggaaggcatacaagcgcagacaaagttgctgttcaatactttacagaagctgcaaatcccgacaattatatttatcaataagattgaccgagccggtgtgaatttggagcgtttgtatctggatataaaagcaaatctgtctcaagatgtcctgtttatgcaaaatgttgtcgatggatcggtttatccggtttgctcccaaacatatataaaggaagaatacaaagaatttgtatgcaaccatgacgacaatatattagaacgatatttggcggatagcgaaatttcaccggctgattattggaatacgataatcgctcttgtggcaaaagccaaagtctatccggtgctacatggatcagcaatgttcaatatcggtatcaatgagttgttggacgccatcacttcttttatacttcctccggcatcggtttcaaacagactttcatcttatctttataagatagagcatgaccccaaaggacataaaagaagttttctaaaaataattgacggaagtctgagacttcgagatgttgtaagaatcaacgattcggaaaaattcatcaagattaaaaatctaaaaactatcaatcagggcagagagataaatgttgatgaagtgggcgccaatgatatcgcgattgtagaggatatggatgattttcgaatcggaaattatttaggtgctgaaccttgtttgattcaaggattatcgcatcagcatcccgctctcaaatcctccgtccggccagacaggcccgaagagagaagcaaggtgatatccgctctgaatacattgtggattgaagatccgtctttgtccttttccataaactcatatagtgatgaattggaaatctcgttatatggtttaacccaaaaggaaatcatacagacattgctggaagaacgattttccgtaaaggtccattttgatgagatcaagactatatacaaagaacgacctgtaaaaaaggtcaataagattattcagatcgaagtgccgcccaacccttattgggccacaatagggctgactcttgaacccttaccgttagggacagggttgcaaatcgaaagtgacatctcctatggttatctgaaccattcttttcaaaatgccgtttttgaagggattcgtatgtcttgccaatccgggttacatggatgggaagtgactgatctgaaagtaacttttactcaagccgagtattatagcccggtaagtacaccagctgatttcagacagctgaccccttatgtctttaggctggccttgcaacagtcaggtgtggacattctcgaaccgatgctctattttgagttgcagataccccaagcggcaagttccaaagctattacagatttgcaaaaaatgatgtctgagattgaagatatcagttgcaataatgagtggtgtcatattaaagggaaagttccattaaatacaagtaaagactatgcatcagaagtaagttcatacactaagggcttaggcatttttatggttaagccatgcgggtatcaaataacaaaaggcggttattctgataatatccgcatgaacgaaaaagataaacttttattcatgttccaaaaatcaatgtcatcaaaataaccacgaagtcaaaaaaaaggccatccgtcaggatggccttcgcattaatatgccgcttcgaattcttttaggaagcgtgtatcgttttcagagaacatacggaggtctttcacctgatatttcaggtttgtgatacgctcgatacccataccgagtccataaccgctgtatattttgctgtctataccatttgattcaagtacgttcgggtctaccataccgcaaccgaggatttctacccagccggtgtgtttacagaacggacatcctttaccgccgcagatattacagctgatatccatttccgcacttggttcagcaaacgggaagtaagacggacgcagacggatctttgtatcagcaccgaacatttctttggcaaagagcagcaatacctgcttcaagtcggtgaatgatacgtttttatctacatacagcgcttctacctgatggaagaaacagtgtgcgcgatagctgatagcttcgttacgatatacacgtcccggacagatgatgcggataggaggctgtgaagtttccatcacacgagtctgtacagaagaagtatgtgtacgcaatactacgtccgggtgagcttcgataaagaaagtgtcctgcatatcgcgtgccggatgatcttcggcaaagttcagtgccgagaacacgtgccagtcatcttcaatttccggaccttcggcaatgctgaatcccagacgggcaaagatatcaatgatttcgttctttacaatggtgagcgggtggcgtgtaccgagttctacaggataagccgaacgcgtcaaatccagtccgtcacaatcgttgtcctgactttcaaacatttctttcagcgcgttgattttgtcctgcgcttttgttttcagttcattcagtctcatgccgacttcttttttctgttcggcagctacattacggaaatctgccattaagtcgttaatggctcccttcttacttaggtatttgatgcggagagcttcgagttcttcggcattggaggcgtgtaaggcttccacctctttcagaagttgttcaatcttagctatcattttttaatatttttagcggccccgttaaacaaaattatttgtagaggctgtttcgtcctcacggactcatcagaccggaaagcacatccggtgacagctcaggctactttgtttctttcgacactgcaaatataagaacattatttgaaagttcaagtgaaactttaaattttaacaatagattaaccattgcaaacaaaacaaaaaaaaggtagcccaattgtaaaacgaaaggcccagtctttcgactgagcctttcgttttatcctacgccagtgttacaaccaattaaccaattctgattagaaaaactcatcgagcatcaaatgaaactgcaatttattcatatcaggattatcaataccatatttttgaaaaagccgtttctgtaatgaaggagaaaactcaccgaggcagttccataggatggcaagatcctggtatcggtctgcgattccgactcgtccaacatcaatacaacctattaatttcccctcgtcaaaaataaggttatcaagtgagaaatcaccatgagtgacgactgaatccggtgagaatggcaaaagcttatgcatttctttccagacttgttcaacaggccagccattacgctcgtcatcaaaatcactcgcatcaaccaaaccgttattcattcgtgattgcgcctgagcgaggcgaaatacgcgatcgctgttaaaaggacaattacaaacaggaatcgaatgcaaccggcgcaggaacactgccagcgcatcaacaatattttcacctgaatcaggatattcttctaatacctggaatgctgttttcccggggatcgcagtggtgagtaaccatgcatcatcaggagtacggataaaatgcttgatggtcggaagaggcataaattccgtcagccagtttagtctgaccatctcatctgtaacatcattggcaacgctacctttgccatgtttcagaaacaactctggcgcatcgggcttcccatacaatcgatagattgtcgcacctgattgcccgacattatcgcgagcccatttatacccatataaatcagcatccatgttggaatttaatcgcggcctggagcaagacgtttcccgttgaatatggctcataacaccccttgtattactgtttatgtaagcagacagttttattgttcatgatgatatatttttatcttgtgcaatgtaacatcagagattttgagacacaacgtggctttgttgaataaatcgaacttttgctgagttgaaggatcagccgcgcagttcaacctgttgatagtacgtactaagctctcatgtttcacgtactaagctctcatgtttaacgtactaagctctcatgtttaacgaactaaaccctcatggctaacgtactaagctctcatggctaacgtactaagctctcatgtttcacgtactaagctctcatgtttgaacaataaaattaatataaatcagcaacttaaatagcctctaaggttttaagttttataagaaaaaaaagaatatataaggcttttaaagcttttaaggtttaacggttgtggacaacaagccagggatgtaacgcactgagaagcccttagagcctctcaaagcaattttgagtgacacaggaacacttaacggctgacatggggcggccgctcaaaccaccacttacgcgtacatttaaatctgtatagtgcgcatcttgtgaaagggcgtcgtcccagctgtcgtcccataatggtttggcgcctgctaccagttttccgtcatggccgattggttcaggataagcactgccataaggattgatgcctagattgcctgtaacattgcttgatgcccatacagcagcttcttcggcagagtaaccgttgtccatacgatagttacgcatggcttcccaatataattcataatattggtttgtattcaactggtcgtagtctgcccgtgcacggcttgaaaaaccatatttggcagataattcaacggtgggtgcgctatctttatttccttgtttggtggtgatcataattacgccgtttgctgcacgtgagccatataatgcagcggaagctgcatctttcaatacagtgattgacgcaatatctgaagatgctatggaggaaagagcaccatcgtaaggaacaccatcaaccacatagaggggattggttgaagcgtttacagaaccaactccacgaatcaggatcgtggcgtctgatccaggctgaccgctggaggaaaaagactgtaagccagctacagttccttgcagtgcttttgatacactactgacctgtgctttttcaatagtaccggcggcaatatagcttgcagaccctgtaaatgtggattttttggcagtaccgtaaggaacggttatcactacctcatctaccatttgggttgtttccttcaattctacgttaatcactttgcgtctgtttaccggtatggttactgtttcgtaacctacaaaagagaagatcaggctttcattgccgttaacctgaatctgatagctgccatcgatggaagtgatggtaccgcgagtttgtccttttacagctactgtgacaccaggcatttcttcgcctcctgcggtgactttaccagttactgtaatttcctgtgcatatgtaatcatgcagaatagcaagctacataataatgaagaaaatctgctcatataaacttggcttttattgggggtttgtacattgccatttttcaggcattatatattgaactctctttctaaaattgtgatgctaccttttttatcattatcatatttcctaatagtggttttatggccatccaaacctcattagggactctttttgcttgtgtattttataattgtgatattcaataacaatcgcaaatatatgtattttgatttaaataggataatatattttaatatttttttatggtgaacctgttgaaagtcaaaactatacggaattttattaacgtagttaaaataggaattgtcttatttaaatattgggcggatagatcaaatctatttgtttatcgcattcctgtgtattgatttgtttaatttgatttcaacagtaaatctacttggtaggtaggtagagtcaaaaaaaaggccatccgtcaggatggccttctcgagctaatcagctaggatttagtgatgatgatgatgatgacctttatcatcatcgtccttataatctttgtcatcatcatctttgtagtccttatcatcatcgtccttgtaatcagatcctttgtacagttcatccataccatgcgtgatgcccgctgcggttacgaactccagcagaaccatatgatcgcgtttctcgttcggatctttagacagaacgctttgcgtgctcagatagtgattgtctggcagcagaacaggaccatcaccgattggagtgttttgctggtagtgatcagccagctgcacgctgccatcctccacgttgtggcgaattttaaaattcgctttaatgccatttttttgtttatcggcggtgatgtaaacattgtggctgttaaaattgtattccagcttatggcccaggatattgccgtcttctttaaagtcaatgcctttcagctcaatgcggtttaccagggtatcgccttcaaatttcacttccgcacgcgttttgtacgtgccgtcatccttaaaggaaatcgtgcgttcctgcacatagccttccggcatggcggacttgaagaagtcatgctgcttcatatggtccggataacgagcaaagcactgaacaccataagtcagcgtcgttaccagagtcggccaaggaaccggcagtttaccagtagtacagatgaacttcagcgtcagtttaccattagttgcgtcaccttcaccctcgccacgcacggaaaacttatgaccgttgacatcaccatccagttccaccagaatagggacgacaccagtgaacagctcttcgcctttacgcattgaaaataaattattgttaatattacctttgaatctcttttcgagtgctttcataatgttattttttaaatgttgtgtgatcagtcctactttgtttctttcgacactgcaaatataagaacattatttgaaagttcaagtgaaactttaaattttaacaatagattaaccattgcaaacaaaacaaaaaaaaggtagcccaattgtctcaccgcccttacgcctcgattagtaggataaaacgaaaggctcagtcgaaagactgggcctttcgttttgggtcggtcctggtattggaacagctttcgcattgagaaattcaagaaatgaaagcggggaaatggtgaacagaaccatgtatgccgaatcggcaggaattactcaggtgtccctgaatgtgatttataaacttcggattatggaatatgaaatcccgttgacggtgatgacgtattggaatccgaaatccaaccagggatttttctacacaggaatgcagttcaatctgttttgattttttatagagtttggggtgactttttatctcctttatgaggggtaaaaatgtcgaaaaagagggggtataatatcccctctttcttttttgaaaatctcctctattgttttgatggatacttcatactttagcatcgtcgaaaagataaagacagtgacatgtaatactaacatattaatatcaataatatccctggcatcccatggcgataaaatataataaaatg

SEQ ID NO: 33 - DNA, 72558 bp, Artificial Sequence
  pWD035 - plasmid for transferring Porphyran PUL
aacaaatactttcaggacgatgtaaagtcctgagaaatcaaactgaatggatagataaatattagtcttttctcatcggattcttttaatatcgctactcttttattatgtagtggttgtattatcttaaataaaacaaaaacacccgactttacattcttgggtgtaaaacagggtgtttgttttgcaatctgctgattttcagcgttttttgcggagagacaggctctcgaacttatactttcacagaatatcataaaactgcaaacgactgataatcaagtgtaaattacaatatagagtaaaagtaaatgtttctaaatgtcttttgctatctcaataattgggtgtatatttgggtgtagaatttcaaacgcacccaattatgaatatcaagcgcaacatcatttttgcattggagagccggaaaaagaacggtgtgccaatcgtagagaacgtacccatccgtatgcgtgtcatctttgccagccaacgtatcgagtttacaacgggctaccggattgacgtagccaaatgggatgcagataagcagcgggtaaagaacggatgtaccaacaagctaaagcaaagtgcagccgaaatcaatacggacttgctgaaatactatgccgaaatccagaatattttcaaggaatttgaggtgcaggaggtcatgccaacgacccaacagttgaaggaagctttcaacatgagaatgaaagataccagtgaagaacagccggaagaagcccctgtcagcttttgggaggtgttcgatgagtttgtaaaagagtgcggtaaccagaataactggacggcatccacctatgaaaaatttgcagcagtgaggaaccacctcaaagagttcaaggaggatgcaacgttcaactatttcaacgagtttggattgaacgaatacgtcaacttcctgcgtgacaccaaggatatgagaaacagcaccatcggcaagcaaatgggattcctcaaatggttcctgcgctggagcttcaagaaaggacatcatcagaacattgcatacgatacgttcaaaccgaaactgaaaaccacctcgaaaaaagtaatcttcctgacttgggatgaactgaacaagctgaaagactaccagatacccaaggataagcaatacctggaacgtgtgcgtgatgttttcctgttctgctgctttacgagtttgcggtattcggatgttcgcaatctgaaaagaagcgatgtgaagtccgaccacatcgaaataaccacagtcaagactgccgacagcctgacgattgaactgaacaaatacagcaaagccatactggacaaatacaaggacatccatttcgagaattacatggctctgcccgtcatcagcaaccagaagatgaacgattacctgaaagagctgggcgaactggcagaaatcaacgagcctgtacgggaaacctactacaagggaaatgaacgtattgatgaagtcacacccaaatacgctttgctcagtacccatgcaggaaaaaggacattcatctgcaatgcgctggctctcggaatcccggcacaggtggtcatgaaatggacgggacacagcgactacaaagctatgaaaccctacattgacatagcggatgatattaaggcaaatgccatgaacaagtttaatcaactataaaagtatcaaacagtttcatagatagttaccaatgactgataggtgggctgcccttcctggttggcttggtttcatcagccatccgcttgccctcatctgttacgccggcggtagccggccagcctcgcagagcaggattcccgttgagcaccgccaggtgcgaataagggacagtgaagaaggaacacccgctcgcgggtgggcctacttcacctatcctgcccggctgacgccgttggatacaccaaggaaagtctacacgaaccctttggcaaaatcctgtatatcgtgcgaaaaaggatggatataccgaaaaaatcgctataatgaccccgaagcagggttatgcagcggaaaacggaattgatccggccacgatgcgtccggcgtagaggatctgaagatcagcgggattaaaagtcggggattggtgaacaaaaaggtgtttctctctttaagagaaatatcgttttgctaaacagttgatattgaggtatcattttatcgtaaaagacatttttgctcaacaattgcttgacggaaatcaacaaattttagcattttgtaaaaaagtcgctatataatttggtgaattggagttattttcatatttttgcatcccgaagagtttctcttaaagagagaaacatcttttgcataccttttccgaccgaatttttatgtcgtaaagaggggctttgcagggggtggactcagaaagatgagaatagatgactattgtagttgaaacacatagaaagttgctgatatacagaccgatacgcatatcgggatgaaccatgagtacgttcttttctcaaaaaacataaatattcgaaaagagatgcaataaattaaggagaggttataatgaacaaagtaaatataaaagatagtcaaaattttattacttcaaaatatcacatagaaaaaataatgaattgcataagtttagatgaaaaagataacatctttgaaataggtgcagggaaaggtcattttactgctggattggtaaagagatgtaattttgtaacggcgatagaaattgattctaaattatgtgaggtaactcgtaataagctcttaaattatcctaactatcaaatagtaaatgatgatatactgaaatttacatttcctagccacaatccatataaaatatttggcagcataccttacaacataagcacaaatataattcgaaaaattgtttttgaaagttcagccacaataagttatttaatagtggaatatggttttgctaaaatgttattagatacaaacagatcactagcattgctgttaatggcagaggtagatatttctatattagcaaaaattcctaggtattatttccatccaaaacctaaagtggatagcacattaattgtattaaaaagaaagccagcaaaaatggcatttaaagagagaaaaaaatatgaaacttttgtaatgaaatgggttaacaaagagtacgaaaaactgtttacaaaaaatcaatttaataaagctttaaaacatgcgagaatatatgatataaacaatattagtttcgaacaatttgtatcgctatttaatagttataaaatatttaacggctaaaaacaataggccacatgcaactgtaaatgtttacgcgggtaccgacaccgcggtggaggggaattatcacgtgctataaaaataattataatttaaattttttaatataaatatataaattaaaaatagaaagtaaaaaaagaaattaaagaaaaaatagtttttgttttccgaagatgtaaaagactctagggggatcgccaacaaatactaccttttatcttgctcttcctgctctcaggtattaatgccgaattgtttcatcttgtctgtgtagaagaccacacacgaaaatcctgtgattttacattttacttatcgttaatcgaatgtatatctatttaatctgcttttcttgtctaataaatatatatgtaaagtacgctttttgttgaaattttttaaacctttgtttatttttttttcttcattccgtaactcttctaccttctttatttactttctaaaatccaaatacaaaacataaaaataaataaacacagagtaaattcccaaattattccatcattaaaagatacgaggcgcgtgtaagttacaggcaagcgatccgtcagcttgcctcgtccccgccgggtcacccggccagcgacatggaggcccagaataccctccttgacagtcttgacgtgcgcagctcaggggcatgatgtgactgtcgcccgtacatttagcccatacatccccatgtataatcatttgcatccatacattttgatggccgcacggcgcgaagcaaaaattacggctcctcgctgcagacctgcgagcagggaaacgctcccctcacagacgcgttgaattgtccccacgccgcgcccctgtagagaaatataaaaggttaggatttgccactgaggttcttctttcatatacttccttttaaaatcttgctaggatacagttctcacatcacatccgaacataaacaaccatgggtaaggaaaagactcacgtttcgaggccgcgattaaattccaacatggatgctgatttatatgggtataaatgggctcgcgataatgtcgggcaatcaggtgcgacaatctatcgattgtatgggaagcccgatgcgccagagttgtttctgaaacatggcaaaggtagcgttgccaatgatgttacagatgagatggtcagactaaactggctgacggaatttatgcctcttccgaccatcaagcattttatccgtactcctgatgatgcatggttactcaccactgcgatccccggcaaaacagcattccaggtattagaagaatatcctgattcaggtgaaaatattgttgatgcgctggcagtgttcctgcgccggttgcattcgattcctgtttgtaattgtccttttaacagcgatcgcgtatttcgtctagctcaggcgcaatcacgaatgaataacggtttggttgatgcgagtgattttgatgacgagcgtaatggctggcctgttgaacaagtctggaaagaaatgcataagcttttgccattctcaccggattcagtcgtcactcatggtgatttctcacttgataaccttatttttgacgaggggaaattaataggttgtattgatgttggacgagtcggaatcgcagaccgataccaggatcttgccatcctatggaactgcctcggtgagttttctccttcattacagaaacggctttttcaaaaatatggtattgataatcctgatatgaataaattgcagtttcatttgatgctcgatgagtttttctaatcagtactgacaataaaaagattcttgttttcaagaacttgtcatttgtatagtttttttatattgtagttgttctattttaatcaaatgttagcgtgatttatattttttttcgcctcgacatcatctgcccagatgcgaagttaagtgcgcagaaagtaatatcatgcgtcaatcgtatgtgaatgctggtcgctatactgccagaagagagaaagaaggaaagcggccgcacaggtttcccgactggaaagcgggcagtgagcgcaacgcaattaatgtgagttagctcactcattaggcaccccaggctttacactttatgcttccggctcgtatgttgtgtggaattgtgagcggacaacaatttcacacaggaaacagctatgaccatgattacgccaagctatttaggtgagactatagaatactcaagcttgcatgcgatacgtatcgttaacgatggatccgacgcacgtgcgaattcgccctatagtgagtcgtattacaattcactggccgtcgttttacaacgtcgtgactgggaaaaccctggcgtcacccaacttaatcgccttgcagcacatccccctttcgccagctggcgtaatagcgaagaggcccgcaccgatcgcccttcccaacagttgcgcagctgaatggcgaatggcgcctgatgcggtattttctccttacggcggccgcttgacataacttcgtatagcatacattatacgaagttatgtttaaacattagcagaaagtcaaaggcctccggtcggaggcttttgactaaaacttcccttggggttatcattgggtcgagaccgcctgaagaggacttccattgttcattccacggacaaaaacagagaaaggaaacgacagaggccaaaaagctcgctttcagcacctgtcgtttcctttcttttcagagggtattttaaataaaaacattaagttatgacgaagaagaacggaaacgccttaaaccggaaaattttcataaatagcgaaaacccgcgaggtcgccgccccgtaacctgtcggatcaccggaaaggacccgtaaagtgataatgattatcatctacatatcacaacgtgcgtggaggccatcaaaccacgtcaaataatcaattatgacgcaggtatcgtattaattgatctgcatcaacttaacgtaaaagcaacttcagacaatacaaatcagcgacactgaatacggggcaacctcatgtcgcctgaagagtgagaccgtcccaactttcaccataatgaaataagatcactaccgggcgtattttttgagttatcgagattttcaggagctaaggaagctaaaatggagaaaaaaatcactggatataccaccgttgatatatcccaatggcatcgtaaagaacattttgaggcatttcagtcagttgctcaatgtacctataaccagaccgttcagctggatattacggcctttttaaagaccgtaaagaaaaataagcacaagttttatccggcctttattcacattcttgcccgcctgatgaatgctcatccggaatttcgtatggcaatgaaagacggtgagctggtgatatgggatagtgttcacccttgttacaccgttttccatgagcaaactgaaacgttttcatcgctctggagtgaataccacgacgatttccggcagtttctacacatatattcgcaagatgtggcgtgttacggtgaaaacctggcctatttccctaaagggtttattgagaatatgtttttcgtctcagccaatccctgggtgagtttcaccagttttgatttaaacgtggccaatatggacaacttcttcgcccccgttttcaccatgggcaaatattatacgcaaggcgacaaggtgctgatgccgctggcgattcaggttcatcatgccgtttgtgatggcttccatgtcggcagaatgcttaatgaattacaacagtactgcgatgagtggcagggcggggcgtaaaaatgtaatcacctggctcaccttcgggtgggcctttcacacttgcatcggatgcagcccggtgaacgtgccggcacggcctgggtaaccaggtattttgtccacataaccgtgcgcaaaatgttgtggataagcaggacacagcagcaatccacagcaggcatacaaccgcacaccgaggttactccgttctacaggttacgacgacatgtcaatacttgcccttgacaggcattgatggaatcgtagtctcacgctgatagtctgatcgacaatacaagtgggaccgtggtcccagaccgataatcagaccgacaacacgagtgggatcgtggtcccagactaataatcagaccgacgatacgagtgggaccgtggtcccagactaataatcagaccgacgatacgagtgggaccgtggttccagactaataatcagaccgacgatacgagtgggaccgtggtcccagactaataatcagaccgacgatacgagtgggaccatggtcccagactaataatcagaccgacgatacgagtgggaccgtggtcccagtctgattatcagaccgacgatacgagtggtaccgtggtcccagactaataatcagaccgacgatacgagtgggaccgtggtcccagactaataatcagaccgacgatacgagtgggaccgtggtcccagtctgattatcagaccgacgatacaagtggaacagtgggcccagagagaatattcaggccagttatgctttctggcctgtaacaaaggacattaagtaaagacagataaacgtagactaaaacgtggtcgcatcagggtgctggcttttcaagttccttaagaatggcctcaattttctctatacactcagttggaacacgagacctgtccaggttaagcaccattttatcgcccttatacaatactgtcgctccaggagcaaactgatgtcgtgagcttaaactagttcttgatgcagatgacgttttaagcacagaagttaaaagagtgataacttcttcaacttcaaatatcaccccagcttttttctgctcatgaaggttagatgcctgctgcttaagtaattcctctttatctgtaaaggctttttgaagtgcatcacctgaccgggcagatagttcaccggggtgagaaaaaagagcgacaactgatttaggcaatttggcggtgttgatacagcgggtaataatcttacgtgaaatattttccgcatcagccagcgcagaaatatttccagcaaattcattctgcaatcggcttgcataacgctgaccacgttcataagcacttgttgggcgataatcgttacccaatctggataatgcagccatctgctcatcatccagctcgccaaccagaacacgataatcactttcggtaagtgcagcagctttacgacggcgactcccatcggcaatttctatgacaccagatactcttcgaccgaacgccggtgtctgttgaccagtcagtagaaaagaagggatgagatcatccagtgcgtcctcagtaagcagctcctggtcacgttcattacctgaccatacccgagaggtcttctcaacactatcaccccggagcacttcaagagtaaacttcacatcccgaccacatacaggcaaagtaatggcattaccgcgagccattactcctacgcgcgcaattaacgaatccaccatcggggcagctggtgtcgataacgaagtatcttcaaccggttgagtattgagcgtatgttttggaataacaggcgcacgcttcattatctaatctcccagcgtggtttaatcagacgatcgaaaatttcattgcagacaggttcccaaatagaaagagcatttctccaggcaccagttgaagagcgttgatcaatggcctgttcaaaaacagttctcatccggatctgacctttaccaacttcatccgtttcacgtacaacattttttagaaccatgcttccccaggcatcccgaatttgctcctccatccacggggactgagagccattactattgctgtatttggtaagcaaaatacgtacatcaggctcgaaccctttaagatcaacgttcttgagcagatcacgaagcatatcgaaaaactgcagtgcggaggtgtagtcaaacaactcagcaggcgtgggaacaatcagcacatcagcagcacatacgacattaatcgtgccgatacccaggttaggcgcgctgtcaataactatgacatcatagtcatgagcaacagtttcaatggccagtcggagcatcaggtgtggatcggtgggcagtttaccttcatcaaatttgcccattaactcagtttcaatacggtgcagagccagacaggaaggaataatgtcaagccccggccagcaagtgggctttattgcataagtgacatcgtccttttccccaagatagaaaggcaggagagtgtcttctgcatgaatatgaagatctggtacccatccgtgatacattgaggctgttccctgggggtcgttaccttccacgagcaaaacacgtagccccttcagagccagatcctgagcaagatgaacagaaactgaggttttgtaaacgccacctttatgggcagcaaccccgatcaccggtggaaatacctcttcagcacgtcgcaatcgcgtaccaaacacatcacgcatatgattaatttgttcaattgtataaccaacacgttgctcaacccgtcctcgaatttccatatccgggtgcggtagtcgccctgctttctcggcatctctgatagcctgagaagaaaccccaactaaatccgctgcttcacctattctccagcgccgggttattttcctcgcttccgggctgtcatcattaaactgtgcaatggcgatagccttcgtcatttcatgaccagcgtttatgcactggttaagtgtttccatgagtttcattctgaacatcctttaatcattgctttgcgtttttttattaaatcttgcaatttactgcaaagcaacgacaaaatcgcaaagtcatcaaaaaaccgcaaagttgtttaaaataagagcaacactacaaaaggagataagaagagcacatacctcagtcacttattatcactagcgctcgccgcagccgtgtaatcgagcatagcgagcgaactggcgaggaagcaaagaagaactgttctgtcagatagctcttacgctcagcgcaagaagaaatatccaccgtgggaaaaactccaggtagaggtacacacgcggatagccaattcagagtaataaactgtgataatcaaccctcatcaatgatgacgaactaacccccgatatcaagtcacatgacgaagggaaagagaaggaaatcaactgtgacaaactgccctcaaatttggcttccttaaaaattacagttcaaaaagtatgagaaaatccatgcaggctgaaggaaacagcaaaactgtgacaaattgccctcagtaggtcagaacaaatgtgacgaaccaccctcaaatctgtgacagataaccctcagactatcctgtcgtcatggaagtgatatcgcggaaggaaaatacgatatgagtcgtctggcggcctttctttttctcaatgtatgagaggcgcattggagttctgctgttgatctcattaacacagacctgcaggaagcggcggcggaagtcaggcatacgctggtaactttgaggcagctggtaacgctctatgatccagtcgattttcagagagacgatgcctgagccatccggcttacgatactgacacagggattcgtataaacgcatggcatacggattggtgatttcttttgtttcactaagccgaaactgcgtaaaccggttctgtaacccgataaagaagggaatgagatatgggttgatatgtacactgtaaagccctctggatggactgtgcgcacgtttgataaaccaaggaaaagattcatagcctttttcatcgccggcatcctcttcagggcgataaaaaaccacttccttccccgcgaaactcttcaatgcctgccgtatatccttactggcttccgcagaggtcaatccgaatatttcagcatatttagcaacatggatctcgcagataccgtcatgttcctgtagggtgccatcagattttctgatctggtcaacgaacagatacagcatacgtttttgatcccgggagagactatatgccgcctcagtgaggtcgtttgactggacgattcgcgggctatttttacgtttcttgtgattgataaccgctgtttccgccatgacagatccatgtgaagtgtgacaagtttttagattgtcacactaaataaaaaagagtcaataagcagggataactttgtgaaaaaacagcttcttctgagggcaatttgccacagggttaagggcaatttgtcacagacaggactgtcatttgagggtgatttgtcacactgaaagggcaatttgtcacaacaccttctctagaaccagcatggataaaggccaacaaggcgctctaaaaaagaagatctaaaaactataaaaaaaaaataattataaaaatatccccgtggataagtggataaccccaagggaagttttttcaggcatcgtgtgtaagcagaatatataagtgctgttccctggtgcttcctcgctcactcgaccgggagggttcgagaaggggggtaccccccttcggcgtgcgcggtcacgcgcacagggcgcagccctggttaaaaacaaggtttataaatattggtttaaaagcaggttaaaagacaggttagcggtggccgaaaaacgggcggaaacccttgcaaatgctggattttctgcctgtggacagcccctcaaatgtcaataggtgcgcccctcatctgtcagcactctgcccctcaagtgtcaaggatcgcgcccctcatctgtcagtagtcgcgcccctcaagtgtcaataccgcagggcacttatccccaggcttgtccacatcatctgtgggaaactcgcgtaaaatcaggcgttttcgccgatttgcgaggctggccagctccacgtcgccggccgaaatcgagcctgcccctcatctgtcaacgccgcgccgggtgagtcggcccctcaagtgtcaacgtccgcccctcatctgtcagtgagggccaagttttccgcgaggtatccacaacgccggcggtcggccgcggtgtctcgcacacggcttcgacggcgtttctggcgcgtttgcagggccatagacggccgccagcccagcggcgagggcaatcagcccggtgagcgtcggaaaaggaatattcagcaatttgcccgtgccgaagaaaggcccacccgtgaaggtgagccagtgagttgattgctacgtaaataacttcgtatagcatacattatacgaagttatggactacgcaggtcaatatccggaacatgaaacccgcaggttctgaaatccgcatattcagaacatggggattcgggaagcgcagcaatacgggcagtctcaggttcgatgctccggtcaggaaatgggaatacagagaaccgaatccgttatatgacggttacaccacccgtaactggttccgctatcatatcatgaaacaccgggacagggaaaggacaggcgaatacaccttccgcagcgattcattcacgctgtacagccggagcgagctggacgagctggccgcaatcctgaaaggcagactctacaagggaatcctgcctgactctcttgtactttggggataccgcatggatattaaggaaatatcacgtgaacagtggaacggtatgggacagcacggacaaatccgcatgaaattcatgggatacggtccggtcagaatccacacggacaatgaaaaccataccgtaacagtatacagaatcaacgacatattgtcttcaactatcagaattttcatattttttcagttctttttttgtttcttctattaatattttaagccactccatgatttgtattgcatgttcatgaacagtttcattttggctatcactgtcgtgtagtagcctttgaaaatcacgtaaaatattgtctttcccaagcatctcccatacaggcatcatccggtggattatttttctcatggtctcacggtcggttatcctgtcagcagattccatctcctccagttctttttcagattccataacaacgagagaaagcatatgactataatcatccgtattctccagtaaactggaaaaatcgaattctccggaaactgaaacttgtgtacgagatataatggtggataaaaaagcaagcagtccgtggatattgaacggtttatgaatacagcctacaaatccttctttttcataaattccggaatttccgtcaccacgggcagtcatgactgctactggaacagttctagaattgccgatgtccgaattgcgaagcaatcttaacaaaccgaatccgtcagtatcaggcatttgtacatctgtcaagatcaaatcatattcagaattttcaagagcggccactacttcacgtgcattcttacaggttttacaggatatacctttgcgcccgagcatatcttccgctattttcagttgtataggatcatcgtccactacaagaacattcttaggcaatatagttattgtattatggtccgatttgtcttcctcaactaactcatccgtttcaggcaaagaaagttccagtctgaacatgcttcctttaccgagtacactttctacatccatttttccttccaaaaccttaattaatcctttggtaaggaaaagtcccaaaccaaacccttcagaattgacattctgtgcggcacgctcaaatggagcaaatattcttttcagtgtttcctcatccataccgataccagtatcccttatttcaatacgaagttttccttctgaatattctgaatggaaattgacgttacccctggaagtaaacttaatagcgtttgtaagtagattggctaaaacctgttcaagtttgtccgcatcaccttttactattacatttgatcctttatgttcagaatataaaatcagaccttttgaagtcgctttacgagaaaactcatctgaaattcgttgcaagaaacggtcaagataaaatggtgtgtcgttacgcaaattaccggcttcattgattcggtaagcatccatcaaatcattaaccagatgtaaaacgtgtcgacaagaatgacggatgtcatctaaatatttttcgcgcttcctcttttcacgcgtttcagataccaaatctgcacagttatggatattaccaagtggacctctaatatcatgagaaactgtcaggatgattttcttacgcatatcaagcaaattctcgttttcttgaatagcttgttgtaatttaaatttaattatttcttccttacgtaaatctgattgtataattaaaaatgaaattaatattataaaaaccgcaatactcatcattacgataaataatcgaaaggattcttgtttgacttccgttacctctaagtttcgttctataaatgacagctgtacctgattatctaaaaaagatacaaaatcatataatttttgatttaacagcctattctgcaaacgcaagctatccacataagtttctatctgattgtttcgcatatctatgacagaaaccaatctattattaaaattctgtatttcattagttatataggggacttgtatcgtctccttctttccgaataatccggcaattcctttctttttctgagttattgtcttcacttttactgtttgagtagctattacaggcaattcattagtaagaatactatcagatttattcgcaaattggactgctttcattatttgaaacaagtgcatttctttcgttttaagcaattcccgtaaagaatcaatttgaactggacataaaaaatcacaactccttaattttatttcaagtagaacactatctgttttaaaacgttgattatgaaatatgttataatcagactcatcccatactataactgattcgcctaaagttgccaacttagtaatatacaaatgaactttattagtattctcataagcttcattaatttgaattatcagattctcaagttctttcaaccggcaacgttcatttatcattacagtaaccatacttaagactataaatcctgtaataaaatatccaataaatagtcttttgcgtaataatgaagtcatcaggaacattctattgatttatttgacatcataattctatatatttaactagtcatagtatatatcattctcaaatatttatttcaaattcaagcaataaaataaaaaaacacttcatattacaactgaactcttttatgaaaaagttgaatatatgaagtgtttttttattacgatataaactataaaatcctattcttcgggaactggtgtataaacccttatccagtccaccaggaaggtgtggtcttccacatttttcagttcctcatccgtagggcttaaacctttaacggctctccagctttggtcttccatatttattatgatgtccatgtcttttaccagacctgtaccaccagtgtagttgttggggtcgataatatccttgccgcttacggttctgacaagttctccatctacataatattcaagtgtgaaagggtctttccagaacactcctacacgatgaaaatcgtcgcgccacaatgttcccttgtcatccttataccatgagccaagatctttcggctgataatccttgaatggctggcggatgaatatgtgatggctcaggtgaagtctgtcggcaccgtaacctccgccgtctctgtcgccgccgtatgcttctatgatgtcgatttcctgagtatcgtcagggctgagcatccatacatcggatgccatggttgaatttgaaagttttgcgtatgcctctacataaaccggatactttacacgtgtcttcgatgtgatacatcccgtataggttcccggcagttcctttgtgttgggtccgcttacaactttcttcatggggacatcttcaggacggctggctcttattttaaggtatccgtcggaaacggaaacatggtctctctgccatattgtaggagcaggtcctgtccaatgattatgatagaaatcggtccatttggcatagaactcttttcctttatccttttcgtcggcaacataattaaagtcgtccgactgtggatggagtttccacaccataccgtcgccggcatcagcgggtacaggatagatatcccactcgtacgatttattattgaaatcttctgctgcacaggctatttgcagcgatgctaaacaaatggtaaacagttttctcatcgtggtatcttagtttaagttataataattattttcgttcttttgattcacctttagcggtatgtgtctgcaatgtccaggtagaaaatctcattatgctctgatagtctgaactgttgtatatatgagtaagaccccatctcaatatttcggtaggttctttttcggcatctgcactgcggttcaggccaatggcgtgtggcgcgccttttactactgacattatttcaaagtttattccgtcaggcgaccactggagtgtgttcttttcaggaccgtcggtggtgataagtgaagctatacctcctttgtaaggccatacgcaaacttcatgcccgctgtttgaaataggattatattccgatttcacatacggacccataggattttccgcaatagccactccgtgtttgatttcacggccgccccatgttatttcttctcccatacgttcgcctttgtagtacatatagaacttacctttataaggtattatacacgggtcgtgtaccttatgactgtcgaaatcacctttcgacactaccttgaatctgttatcctcatcgccttcccattcgccggtattagaaggttccagtacaggcttgtctgtcttgatccacggtccttcaggggaatcagcacatgccataccgatagtattctttacacggactgtgtaaggggattttaccgcctgatagcaaagataatactttcctttccattccatcacctcaggagtgaagactgaacggtcgtcgtaagcacctttttcaccacgtttcactgcaattccctgttccttccatgtccatccgtcttttgatgtggcataccatatatcacatctgtcccatgggaaaaccttatctttctctatatctccagcaaatccttgggtaggtccatagctctttgaataccatacataatatgtattacctattttcagcattgcactcgggtctcttcttactacgccctcttcataagcaagatcacctttaagtggttccatcttatactcaaagaaccatttattgtcgtgattttcccatttcatggcacgtttcatagctgcacttaacttatttcccttaggtattcccaatgaatcggccttacgctcatcataattctgagtgtcgtcaacggcaatagtctgtgtattgcctgtatttccgcatgctgccaatagcgacatcatgccggctgcaagaataatttttctcatactagactttattttatattaattgttagtttattcgagtgtaattcacttgtttctgcactgatattcagtaccgatgatttttctgtcgactgaagcatcagcatacatcttccctgatatgtcataatatccttactttgatatggagaaacgttcttcacgtttccattgtctataccaagcagacggtactctccatcaatgttgaacttaagcatctgttctgttgtctttacaggattaccttttttgtctgttagctgagctgtgacatgcagaacatcctttccatttgctgcgatactttgtttgtcaaccgtcagcaatatcgaatgttctttgcctgaagtccttatagctgtagtggtattacctaacttattttttccttttgcggtaatagtgccaggcttgtactgaactgcccatttatagatatgatcctcaaaatcgtctatatacttctttcccatcgacttaccgttaacgaaaagttccacttcatcacaattggaatatatctctactattaccgagtcacctttctgataattccagtgagagtttacatcatcccaaacccataattttctatcccattcatgtcctttcttatcagtaaatccatcttttacatggagatacgaagatttgtctgtagtctgtgaatatatagcaataaaaggcttgtctgtccacaatgatttcatcatgtcgtacgaaggcttcacatagccgcacatatccaggagaccacatcctatcgacttttgaggccattttgaaagacggctttcactttctcccagataatcgactcctgtccatataaacatacccggaacgaaatccctttcaatcaccgccttccattcgtgccactgaccgagattttctgtacccattataggcttgtcaggataattcttcttagcataatcatacatcacgcgacggtagctgaagcctgccacatcgagcgcgtcgatatatcctgactcaaagcttatggaaggcaggatgcagttggcggtaactacacgtgtggtgtccatctggcgtgtccatgcagctaatttttgcgctgtacggccaatgtcgtatgcatgtttaggctggattttccacatttctctgattttttctttagagtatggaggctgattccagaaataattaccgttggaatcggcaccgaagaaacctgtcgcctcgcggcatccggtataagtccattctatttcattacctatactccactggaagatacaggcatgattacggcttctcctcattacgtttttcaaatctctttctgcccattcctggaaatgctcgcaatagccatgcgtaggatagtcttctacagtttccttcatattgagtcttttatctttgggataatcccactcatcgaagaattcttcctgaaccagaagacctatctcatcgcacaaagacagaaactcttccgctcccggattgtgcgagaggcggatggcattgcatcctccttcctttagggttttcagacgccggtaccacacatcgcgtatcattgccgcgccaaccattccggcatcatggtgcaggcatactccttttatcttcatgtttttcccgttaaggaagaaacctttgtctgcatcaaaacggaatgtccgtatgccgaacctgacagtgttttcagaaattacttcatcgccattcttgatgcgtgtctcggctgtatagaggacaggtgtatcgacgctccacaaatcaggctgtttaatctcagatacgatgtcgataattttctcctcaccagcattcagttttatactgaagacctcaaaggctgcgatattgcctttattatccttatatactacctcaacaactgcagctctgggttcggagtagctgttgcacacggtaacctggttgtttactttagcatatttatcagtaaccacgggagtagtgacaaatgttccccaaaccggaatatgcagtctgtcggttacaatcattttcacatccctgtatatacctgaaccggtgtaccatctgctgtcggcataatggctgtggtcgacccttacagtcatacggttatcctcattgggattgagatagtctgtgacatcaaaataaaaaggagcatatcccgaaggatgatatccaagctttttgccatttatccaatactcagaattattatatactccatcgaacactatatagcatttctgatttgcactgattgttgtgggaaatgatttgctataccatcctattcctccctgaaggaaagctacacatccttcacccgaaatggaatcgtaaggtaaaccaacactccagtcatgtggcaggttcactttcttccattcatcaccagggacataagaagtatatgaataatgagcagaatctttcagtacgaatttccaatctttattgaaatcaacatttgaatcagatgctgaaacctttagggttgataataggattattaaagctaaaagatttttatttctcataatcttaggttttacatgttttttgatgtcacaaaactatatctttcacttataatatatgagggggatattaatgtgatatagggtgggaaatcagaattttacatctgccctgtattccaccgtcacctacaaccttgacaaaggatgttcctttcttccctcttatggttctcaggacaaacagacactttccgttatatgtccttacactattgtttatgacgttgatgttcaaatcttctatcgaaggcgatccattgtcgagtccggcaagttcaagcttgtcgtcgaggattatcctcacatccgaaggtatatcgactactgtgtttccttctttatcttcaatggatacttctacatggataaggtcataaccgttgtcggtagctgttttgcggtcgcagttcagtgccagacggcacggcttgccgcttgtggacaaagtgtctttcgacaatattctgtcgccgtccttgcctaccgcaaggagtgttccttccttgtatgccaccttccacatcagtatattatgctccatgaaatcgctgcgtttctttgttcccaacgatttgccgttcagaaacagttccacttctggggcgttggtatatacctgcaccagtatgtcctcgtccctgcggtacttccatttatcgcgtgtgtcgtaccactcccagcgtctgatccatcccgggcgtggagtgtaggtgaaacttccgtcagtatccatcttgaactcgctttccttttcaggtattgttacaatatgggttttcggtgtgtctttccacagacattcaaagaaatggccacgcgctgtcttgttgcccacgaaatcgaagaaagaacagtctccaccccttgcaggccatgggccgttctcgccaagatagtcgaatcctgtccacacgaagatgcccgctatgtacttcttgtcggccacggctgtccattcaaagagctgaccaacattctccgaaccgataataggctgatatggatatagcttatggtcgatttcataatatttgtctttatagttatatcccactacatcaagaacgtctgtatatccggagagacgcgaaactgacggaacaacgactcctgaagagacgggacgggtagtgtccacatccttaacccaaccggcaaggacagcggctgtttcagccaaatcgtcttttcctcctgacagacggttgaactctttcagtatagacttgttgtctgtttccgggtcgcccgtatggataagacccttgaaccctttattgtctttgctcgatgcccagtaatatggataggtccattctatttcattgcctatactccagagtatcacgcaaggatgatttctgtctcgcctgatgaacgacttgaggtcgtgctcggcatgcgtatcgaagtatctggtatatcctattgatatgctgtcgggcgcatcttccttagctcgctcagtaatccactttttctttgccaccttccattcgtcgataaattcattcattacaagaagtcccagactgtcgcacatttccagcagactttccgaatgcggattatgggctgtacgtatggcattgcagcctatggaacgaagtttcagaaggcgtcgcaacagggcatcatcgtatgcggcaacacccatacatcccaagtcgtggtgtatgttcactccttttatttttactgattttccgtttagaaggaagccttcatccgcatcgaatttaatgtcgcggataccaaattttgttgttttcttatccatcacatatccgtcagaagcaatcagagtagtatgaagctcatacatcgaaggcgtttcaagactccagagatgacaattctccagttcaacagatgcagtgaactcattgaaatcgcctttcagggcaacaaaatcatcggaaacagaagctattgtcttgccgtcgtacactacttcgtgcttcacggtgactccttttacacctgttccagcattcttcacctcgcataccacattcaccatcgaacggttgcctacctgtggtgtggtaacgaatattccgtctgaaggaatatagagctcgtttcttagaataagactcacattcctgtatataccggcaccgacataccatctgctatcggcatacgctcttctgtcaacgcagacagttattgtattcatcgaaccttttggtttcagatattgagtaagttcatattcaaatcccacatatccgttaggacggaatcccaacatatgcccgtttatccaaacctttgagttattatatacaccttcgaaatgaatgaacacttttttcccattcatatcatccgaggtgagaaaattcttcatgtaaatccccacaccgccagacagaaaaccattgcttccggctgtctgagtcttggtatatccttcgctgatactccagtcatgaggcagacacacatcctcccactttatatctggactcaggaacaaagtgtcctgaggcacgaaacctgctggtttgctgaatttccaatcgaagttgaaatccactttagtggaggttccggcataacagaatccggacagaaagatagttaagactgtgataatgttttttatggtcatatcgattttcagattaatattaatgacaaaaataatttcaaaagtgtaaaaacaaaaaaactctccatttatatttcagatatcaacggagagtttcatcattaaaaaaaataaaacattttataaagttactccttgcttaaggatagctatttcccggtatcccttcttttcgttcagtgcctgctttccgcttgccacttccaccacaaagtctataaaacgtctgcttaaagattccatgctttctccctctaccagagttccggcattgaaatcaatccacgtatgtttctgttcataaagcggagtgttggtcgaaaccttcacggttggaacgaatgttccgaacggtgttccgcggcctgttgtgaacagcacgatatggcatccggcagaagcaagagccgtacttgccactaggtcgttgcctggtgcgctcaacaggttaagtccgtgtgttgtgacacggtcgccatatttcagaacatcctccaccatcgagcttcccgacttctgtgtacatcccaatgatttctcctcaagcgtggaaatacctcccgccttgtttcccggtgaaggattttcatatattggctggtcgttgcggatgaagtagttcttgaagtcgtttatcatggccactgtgtcgtcgaatatctccttcgtgcggcaacggttcatgagcagtgtctcggctccgaacatttcaggtacctccgtgaggactgttgtcccaccctgggcaacaagatagtcagagaacaccccaagcatcggattggccgtgataccggacagtccatcagacccgccgcacttgagtcctatacgcagttttgacagggggacatcagtccgcttgtcttccctggctatggcatacatctcacggagaagtttcataccctcttctatctcatcatctactttctgagaaacaaggaaacggatcctttgggtatcatagtcacctataaactcacgaaaggcatcaggctggttgttctcacagccaagacctacgacaaggacagctccggcattgggatgaaggaccatgtcacgcaatatcttacgggtgttctcatggtcgtcacccaactgcgagcatccgtagttatgagggaaagatataatggagtcaaccccctcgcaacctgtttccttgcgaagctgctcggccaactggtttactattccgttcacgcaacccaccgtagggataatccatatctcattacgtatgccggcttctccgttagcacgcaaataccctttgaatgtatggttctcgttcgtgaatgtctgtttctcgaacttcggagtgtaagtgtatgtactcagaccggaaaggttcgtcttgacggttttctcgttcagcagatgtcctttcctgacttcctttacagcgtgcgatatggggaaaccgtattttatcaccatatcaccttctgcaaaatccttcagggcaatcttatgaccggcaggtatatcctccattaattctatggaattgccgttcacctctattacagtccctttggacaatgggtgcagtgccacagccacattgtccgcagggtttatctggatatattcagtcataacaaactaacatttataaattgaagaatacaggtagaagtatcaacctacaaggtcttttactgtctgaagcattccttcgctctggattttgttgatatagtaaattacacggtctgccagtcccgagatagtattaaggtcttcaccccaaatggaagtatcggcgagaactgtcttcacaagattttctaccgagccatcgttccacaaacttgtaagcatcgccatgatttcctgtgcatcgttaggaactatctctacaccatcggcacgctttccacctttgtagtatactatgatggctgcaagaccgagtacaagtccttcaggaagcacacccttacgtttcagatattccttcactcctggaaggtcgcgtgtggcatacttagggaatgagttaagcatgattgatgttacctgatggtctacgaaaggattattgaaacgttccaggacatcatcggcaaacttcttgagttcctctttcggcaggttgagggtctccatcagctcgtcgaacatcacacgtttgatgaacttgcctatcacctcatgttggcatgcgtctctcacgatattgacgcccgaaaggaatgccaccggcgacaatacagtgtgaggaccgttcagcagagtaaccttgcgttcatgataaggctcctccgacgggacgaacagaacgttcagtcccgccttgtttgcaggaaattcttcggcaaccgattccggtgcttcgataacccacagatgaaaagcctcgccctgtacaactaaattgtcatcaaagtatagtttagtttttatgttgtctatgtctttacgagggaaacccggtacgatacggtccaccagtgtggcatatacaccacatgcagtttcaaaccatgacttgaactcttcgccaaggttccacaattcaatatactgatagattgtttccttcagtttgtgaccgttgaggaagataagctcgcatgggaagatgatgagtcctttcgacttgtcaccgttgaaatgtttgaatctgtgataaagcaactgtgtcagcttgcccggataagagcttgcaggagcatcctcaagcttgcacgacggatcgaagttgataccggcctcagtagtgttcgagattacgaatctcatatcaggctgttccgccagtgccatgaagtcattatactggctgtatggattcagcgcgcggctgatgacatcaatcattctgaatgagttcaccacctcgccattgttcagtccctgaagattgacatgatacagacagtcctgggcattgagggcatcaaccatacctttttctataggctgcaccacaacaacactgctgttgaaatctgtcttttcattcatattcgagataatccagtcgacaaacgcacgaaggaaattaccttcgccaaactgtatgatacgttccggacgtactgcctttactgcagtcttactatttaaagctttcattgtaatgccaaaaaattaaaattgataagattaaaattcaaccaacattctgaataccttacctggattttccgaccatttctgcagagcctcgcctgcctcttcaggtttcactacggcagagataagttcgttcatcgggcagttgccattctgaagataatgtatcacggcacggaaatcctcaggcattgcattgcgcgaaccgcgtatgtcgagttccttctggacaaaatattttgtctggaaagccacttcactcttggcatagccgatacatgccacacggcctgtgaaacctacaatgtcgatggcagtaacatatgtgataggactacccacagcctctatcaccacatcagccatatagccgtcagtaagttcccttactctttccaccacattttcagtcttcgaattgataaccatcgaagcacccaggcgttttgccagttcaagcttctcatcgtcaatatccaatgctattacccttgcgccacgaagcgatgctcttactatggcgccaagtccaatcattccgcaaccaatcacggccacagtatcaatgtcagttacctgagctctcgacacggcatggaaacctacgctcataggctcaatcagcgcacattccttatccgaaagaccggcagccggaataacctttgtccaagggaggacaaggaactcctgcatagaaccgttacgctgaacacccaaagtctcgttgtgttcgcaggcattcacacgtccgttgcggcatgaagcacactttccgcagttggtatatggatttactgtcacgttcattcccttctcgaaaccgacaggaacgccttcgcctatttcctctatcacagcacccacttcatgtcccgggatgacaggcatcttcaccataggatttcttcccaggtaagtattaaggtcggaaccacagaatccgacatatttgatacgaagtaaaatttctccggctccaagtgttggtttaactatatcagctacttgaacctttccggcttcagtaatttgtacagctttcataatctatgtatttatttaaatttgttattgtattattttgatgttgcattaattcaatgttgttttttctctatcttatatcctctccagccataatatgccgtaaagaagaaacatatcagaggtattacatatgccacctgatagaagtccgcgttatgattcatcacaaatgcggtgaactgagggatgcacgcattacctataatagccatcacaaggaatgccgaaccactctttgtgtcctcgccaaggtcgcgtagtgcaagtgagaactgggttggatacattatcgacatgaagaacgacactgcaagcatggcataaagtcctgtcataccaccgaacatgataattactccacacagtatgatatttactatagcgtatgtaagcagcatatcctgaggtctgaatttcgacattagcatagtacctatccatctgccgccaaggaaagccagcatatacagtccgaagaatgtggtcgcctcatcctccgacagacctgcatacatgcagcagtaaactaggaacaggctgttgatggctgtctgccctccgttatagaagaactgtgcgataactccccatctcaggtgtttgcgtttcaacactgcaaaattgataagcttgcccttctcgccgtgcgattcctccttgtcaatatcaggcaacttatacagtgcaaacaccacagcaagaataatcagcaggactgcaagaaccagataaggcatcttcatggagtctgtctccatctgaataaatccgtcccaacctccgggaaagtcggcaggcagagtctcgcgagtatagttctgtccggtaagtataagcttactcagaaacattgcggatatgaaagcaccaagaccgttgaacgactgtgcaagattcagtcttcttgaagccgtatcgtgtgtacccagagctgtcacatacggattggcagcagtttcgaggaagcacattcccgttgccatgatgaagaagattacaagatatgcccagtattcctttatctcggctgcagggaagaaaagcagaccaccgatggctgcaagaatgagaccgacaattatacccgacttatagctgaaacgtttcatgaacattgctatcggtatgggaaacaggaagtaggccagccaataggcagcttcagtgaacgaggcctcaaaagcattcagttcacaggttttcatcaactgcctgatcattgtaggcaatagattactgctgatagcccacatgaagaacaagctgaatatcagtaaaagcggtataaaatatttgtttttcattctgacatgtttttaatataaggtaactcaggcagattcttgaaaccgtaaaaggctttcgcgttctcgcccaagaaaagttttttgcttctctcttccaattcttttgatttaatcacaaagtcgtacgacatcttgtaggtaatggctgtgattgtgcgtggatagtcggaaccccacatcagtttctcgaagccaacaaggtcggcagcttcgttgatggctctgacagcgctgcggaacggatagaactcgtcattgaacagccaagtgataccgcccgactcaatcatcacattcttatgacgggcaagcattatctgcttcttccaatccggtttagtcaccataccgaaatgcccgatggcaatcttcaagtacggacattctgaaatgatttcttccatctcgcccacctggaggtctccctctgccatatctatggaaagaatcacccccttgtcttccattagatgaaacatcctcatcatctcgtccgagttgagcatcaccctaccgtccttcagttgcaggcggtgtcccggaatctttatggccttgaaccctttgtctataagttcaaccgcctggttatagaaacccggttttctgaattcacacataccacacacgaagaacctgtccggatatttcgtcatcacctccatcagatagtcattctgaatgccgtcgatatactcctgtgtgacaacagccgcgccaatcagggcataattcatattagccaggaaaacctcagccgtgtttcttccgtcaatcataaagggggggggagcatttgtctcacctcccccataaacaatgattgaccgttctctgtagtcttgattttcaggccatctacttcagtgtcctgataaagccacagatgcgaatgggcgtcaattattgtataatccatagaaacagtatttatgaatttgcccaacttactctttgctgatcgcctattatctccttaaccttttccacaaggctccagtctatcggttcctcaatgtattttatgttctgaagcacagactctgttcttgccgagctgaacaatgttgtaggtattctcggattgcttacagagaactgcaccgcaagtttctcgatagggtatccctgttcagcacaatacttggcagcctttgcacacacctcaatcaatggttttggagccggatgccattcaggaacacctctatgtgtgagaagtcccataccgaacggcgaagcgtttatcactcccacaccattttcgtcaaaatagtcgaggaagtccaccagcttgtcgtcgttcaatgaatagtgacagaagttaagcaccgcctctactgtacccggagcggcatggtcgataatccatttcaggttttcgagctgcaggtcggtgatacccacgtggcccaccacgcctttcttcttcagttccaccagagcaggcaatgtctcgttcaccacctggttcatatccgagaactcaacgtcgtgaacgttgataaggtcgatatagtcgatgttcagacgttccatactttcgtaaacactctcctgagcgcgtttgtccgagtagtcccacgtattcacaccgtccttgccatagcgtcccacctttgtagaaaggatgaacgattctcttggcaattccttcagagccttacccaatacggtttcggctttataatgtccgtaatatggagaaacatcaataaagttcagtccgcgttccactgctgtaaaaacagactgtatagcgtcactttctttgatagaatgaaaaactccgcccaatgaagatgcgccataactcaatacaggaaccttaagtcctgtctttcccaattcacgatattccatttttgataaataatttaaaggttaatattttttactctgtttattcttattcatacagatagaacatacgttccatcatcttccatttctcgtccgatgtggccccctcggcacactgctggaatttggctacgtattcttcccattcggcctgacgcggcagagtggcaagctttgccatagctgtatcccagtcaaaatccagaggtgtttccactatcataaagagttttgaccccaatatgtatatttccatttccaggattcccacctcgcgtattccggcgcgtatctcaggccatgcctcttccttactgtgagcctttctgtaggcttcaatcaattccggattctcacgcagactcaatgtctgacagtatctcttcacaggcagggaataacttttcactttatatccttctgtcttcatgatattattgatattaatatgttagtattacatgtcactgtctttatcttttcgacgatgctaaagtatgaagtatccatcaaaacaatagaggagattttcaaaaaagaaagaggggatattataccccctctttttcgacatttttacccctcataaaggagataaaaagtcaccccaaactctataaaaaatcaaaacagattgaactgcattcctgtgtagaaaaatccctggttggatttcggattccaatacgtcatcaccgtcaacgggatttcatattccataatccgaagtttataaatcacattcagggacacctgagtaattcctgccgattcggcatacatggttctgttcaccatttccccgctttcatttcttgaatttctcaatgcgaaagctgttccaataccaggaccgacccttagcttttcgttctgatagatggtatagcccacatatacgaaactggagtagatgttcttgctgttgtccagatccctgtcgcgaccgtaaacaagtgtagagaagctcaactccagcggaaatttcctgtcgcccgtataattgaccatgagatcaacgaaacgtccagtttcatcaggcttatagttgaagaactccttattattatatgtagccccgggcgagaaattatatgtatctatagcctttatctgaaacctgccatgagtatatgctatatactggctcagctccttataactccccctggtgttcgatccgccaaggaaaccggcggtaaacctccccgatgggtcggaaaccgacaaatcggacgagagaatcagtccgtcggccacttcaatgccacgccatagaatcatgttctgtagagtagtactgaaatgaagctgagcctgaacatttgctgacaaaaatataaatacaggaattaacagtcgctttttatacttacaggtatccaatgataatatatgtatcatactcagagcagtagaaaatcggttttaaattattattatggatttatttgtcgaaatactctataagattataaacattccagttaatatccgacatgtatttggtcaatgatgtataaggtttatagttataatcgagcatacctttattgcaatcctcatcatccagatacttgaagaaaacccatcctacacaattcttggcttcgagcagtcccaaggtaaaatgctggtaagcgaatccacggttttgctggtcgcgtaccacgaaaccagctccacttgaattgtcaagcttagtatcctcacccttggtatagaattccgttaccatgaaaggagtaccgcccgcctggttcttccagccatccatgtagcctttttcaggcgaccatttactataataatttatggaaatgacatcacaatattttcccgctgccttaattatataactgttgtatttaggaaggctgtgcaggcgtgaacccagataaagcaattcaggatccttcgatgccttaaccgcattctttatggcagaataatatttttccgcacaaataccggcaaactcattgttcagttcatccgttacatcagaaacatttgcactcttgtccttatccgtcataaacttggcggctgcaatataagcaggatcctgcttgtttgaaattttcaggaatctgtcgagcagcctgtttccccatgtagagaagtctatctcattatccgagaagaatcccaacacatccgggttgtttctgaacatgccgaaagcatccgaattgagatactccttgcaccattcatcccatccatcataaaacacaagacctatcttaagattcacgttctgccccggatagctaattcccttgctattcttgaactctgcaaggaatgaaaaggaaggagcctgtgtcagaggacttgaagccgatttattataatcatttacagccttgtcgccttcttccttaccgaaagcgcagacactatgaaatcctatttcagagaattgtttctgcgactttgccacccagtcatctactgaactgtaaagcttgccgaaagctgagctgttgccatccattctgaatgaggcgataccccttacataatatggataaccttcggggtcgactatccaacttcttccatttgagtttttctcaaccctgaaccgtccagtagccttggatttttgcccttttgcgtatgagccatatttattcacgctttgcaaatactcatcctgtgtttttgtctgctgttcataaccaaccaggtatggcaatatccttgtctttgcctctataaaagccttgtcaggtttttccgcatactcgacaattatcggttgatactgcttggtgctattaggataggtttcagcaggaccgggaacaggcagttgcagttctacatcatcatcgtcattatcgcctgcattgtcgccgggagtattatagtcctccacattccccggttgtgagtaaataacctcaggcggaatatatgagaactcctcctgagggtcttcacatgacaaagcgaagaacggaacactcaagcaaatggttttagtaataatagtagaatatttcattgttgcaaatatttagtaaattaatataaatcccatgtcctgattgtatccccccatcggtggtctatcgggaactccatttctccccatgccttaacagaagtccaaggttggtcggcatcagtccagaatgggtcagaggcaggcaatcccaacggaaggaatgcaagtgtagtcatatacaggctgccattgtttgtataatgattcgaaatgccagtctgatgtccgcagaatcctatggtgaggaatccgccctcattgaagttattgcccgacttgaacatacgtttcatacacgctgtcagcgcacatctcacctgtgctttcgatactcccgccggcaactcattataccatgctataagagccagtggctgcattgttgccatacggtaaggtatagagcgtccgaaaacagggaatgttccttcaggagatatgaaacgctccagaatcatggcgaacctctgtgccctcatcaatgccctgtcatagtacttgcgatagtcgaaacgtgtcctcacgcccgattccattattgcatgtatagattcgagatacataggatggaacacataactgctataataatcgaatgcaaagtgctgtccgtctgcgtaccatccgtcgcctacataccattcctccaccttgcggaaagtagaatttatacgatatgtatcctgtccggcatcaattttggcaaggaagctttcaatggtggccgagaacagcagccagttagtgtaaggagggtcaatgcgtcggagacctttgaactcttttatgtagcgttcctttgttgtctggtccagcggtttccacagctggtcgaacgcgcgcaggaaactttccgcaatataggcagcatcaaccagtgcctgaccatgaccgttccacaacagataatccggactattagggtccaccgcatttgcataactcttcaatgcccattctttcagttgcttgcgctgctgtccttctgctgtatcatcgtcaggcaggctcaaccatggagctataccggccatgagacgtccgaaagtttccatatatgcaaccttcttgttacggttatcccagtttggacttacctcaagaatcatatttttctgcagttcccctttcgccatattgctcaacacaggagcagccatcctgtaagccatatccgtccagtattttcttgtctcgttgttgtttgcctcgagataacgcacatactcgcaagcggcaagaaggaatgcgcctaccccaaagttggcagtcgacttggcgtcaaccacctgtcccggaatagccttttcaccgattggctggacataacccaccgaccagtctttctgcagtgcagtcttggtaagatatttccatgctttccccactacaggcataaattcatccttgtcaagataaccgttgtttatcccccaaagcataccgtaagtgaagaaagcggtaccgcttgtttccggtcccggagcatgttccggatccatcatacttcttgtccagtagccctccggctgctgcagacatgcaaccgcctttgccatacgcacaaacttatcctcgaaaaaagacagatgctcataaccctccggcaggtccttcagcacctttgccagagcggcaagcacccatccgtcgcctcttgcccagaaatccttctttccgttcagactcttatgcttgggataaacatattttgcgtcgcgataatagagtccttcctcctcatcatacattattgagtccgacgtacaaagatattcatacagtttcttaagataccggtgattatgcgtaatcttatacatcttcgtcattaccggcatcaccatataaagtccgtcgctccaccaccagtaatccttacgcggtgtgctcatctggtactccatgacttcgcgtgcacgcttgattttataattctccggcatgacgttatacaagtccgcataagtctggaagcacacctgataatcgccgaacagcacataatcatcctttaccccgtatttatacttccattcagatttgttgttgcttttcgcacccatccactggttatactcagcccatgcctccgaatactttctgtattcttctttcccagtaaggaaataggcttccatattaccggtgtgatatgccgcataatcccagaaagaccttgcttcgggggcatgatttttctgccaggcatcgttcactttttcaatcatctccctaacttgctgagcctcagtttttttttgcgaaggaaaatgaaggtaaaacagctataaggatgtataacatccagtagtatctataacagttcatctttgtgatattgtttacattttctaaaacgaaatggggaagaatatatattcctccctcatttcacgaataattgtattattatatttatttgttaggagtccattctgctccgttgttgaaaccttctgttgtagagtcaaaacttgcatctgctcctgtacttggtctttctgtaatttcttcaatcttaaaagaagtgattttagcggttccagtagcatcagtaccaccagggacattagtctgtacagttaaaataacgttctcaagaaccggccacacaagtgaaccatctgctcttgaagctggagtttcagcagaagtagaactactgattgtgaatgtatttgtataggttccacttccggtatttcttccaatccagaatttatatttatcagatgctcccaatctgaatgttgttgcacagtcgttagatgcgtatgtataagtaaatttgtaagtacaaccatcacggaatgacattgatttagtaactgggaattgattatctgctggaacaatttccaattctccacttgcattaattttttcggcaactccttctgcaagatattccttaactgcatctatgttagcgaagttaaaatcaaaagcatctgcatgagtcaaagcaacattggcagattcaatcttgatattagcatcttcgttgttttcgtttttagcagtcaaagcactaacagcataatcagtgttataacttacgctaatatttgcgtcattactataaatcttatcaccaagaataagagtcatagtagttccattcacagaaccggaagcaacaggaattgtttttcctgctactgttatggtaaatgctttgttaacagcatcagtgaatgttccagaaacttccttatcgagtgtaagttcaattcggtcattacctgttgtctgatcaggaacaatttctttagctgaagaaacggcaacagtagtttgtttttccaaatccacaggaggttcaccgcctccttgatcatcattcaatactatcgttacaatctgtcctttagtaactataaggttttcaccactgaagttataagttttagtaccagaatttcttgtaagttctaaagtaaatccatcggtaaatgtcaccggagctacaaccattgagtattccttggcatttttattttgttcattaggaccaacaaatgttccctctttagcggttagagttataacattagaaccggattccactgtcaggtttgctgaagcatcaatttttacgttccctgcaatctttacatcaccaccagcagtaagtttaatacctgtaaggtcagtaagattatttttaaacttaaccaatccacaagtattctggaaagttaaagatttgttattatctgttgcagtagcataagatatatttgcatttgcatcgaatccccaagccggagctgtctgttcagatggcagtgtagtagttacgacaccttcaagacacacagcttcggcattataaggataaagagctgtatatgaattgttaggtgtagccttacctgtaaacgttgtaactgtgctaccacctgtagcggtagtaaacttgttattttcttggcctgaaaagatattgattgcatctcctgttgtccaccacaccgttgttccattctgcaacgaactacggcttgaaggcgtaccggcaacaaaagtcatatcctgaggaccactgactgcatttacattcgacagttcgtcttttgtacaagactggagcattgcaatactcatcaaagccgctccacaaaatagcatcgtatttttcatgacataaattatttgttaaacagtttcaataataaaaaatcacatcacttgttattcatattcttattctttaggatcaggtttccattcagtaccgtcatcttcaaaatcatcatgaccgccatctacaattccgggaggtattgatattcggcataccgcactttttattccattacccgtatctacagaagcaccgatattagaatctctgcccccgtcgattgccacgaccgtacatctcattttatcgtccgatggtgtaatcatcaacacatcagggaaagaagttccccaaactattgacttgtaaccggtataagggagattatccttggttatattaatacccaactccacagtgccactatatggtaattctatataactgacaggtttgttgtcagtctgcccatccttgaacactacatattcaatttttatctcctcagctggtgttccatcacctccacctacgccatcatcatccttatcacacgagattgccgtaaactgtataaaaagaagtatgaaaaggttgtatactgacagaatccgtggttttatatcaaccataataaaatgttatttaagcgccaaacaaaattttcaatattcaaaaggcataagaggaaaccctgaatatgccttattaccatgaaaacaaatcaatctacctttttcaatccggaatcagaaaaatatgttatttatttagaacatatttttccgatttgccagattacaatcacaataaataaatcaacaactaaatctaattacctaatcttataactaaaccctcaaacaatgttatttaaccttttctatcttgacatcatcaagcaggaagcatccaccattacctgaacccggaacagctgtgaaacgatatacaaaaccattttcctgcaatttgaatttaactgttgtaagattgtaattcttacggtctttcttgacctcagcagtggcaatttcttccagtttctttgaatccggattatagtactcaatcctgaagttaggtttgtcaccccaactgtatttggtataagctgaaatctgatattctgctccagtttcatagctgatgtttacagcctgccacataccaaccttcacctcaacagcatagttgcctgaatgtgcctttttcgcatcaactattttgttatctttcttttcccagacattccatgatgtcaagtcacctgactcaaaatcaccgttcttaatttcctgagcgtatgcagaagtcatcatcattccgcaagccatcattgctaaaatttcttttttcattttttctaaggtttttaatttaagtattatgttgtatctattaaaatcactcttctattggaaccaacttataagccctgacccagtcataataagtagtacttttgtccttatccttcaagtcctcagctgtaggtacttgtttttcccaatcgtatgtttcagtaactatatgtatgaacataggtcggtcaaacggagtatctgtatattttgttgtaggcttgatagtgtacatatactttccgtcataatagaatttcacggtatttgcatccacccaccaacaaccgtaagtatggaaatcttctgccgatgggtccgtcatatacgaaaccacatccgaacgtttcgccgtattgtcagtacgtttgcctccttgttcctgataccaatagtgagtattactgttcatctgcatattccatgtcttgttccacggattatcagggttgacacttcttattatacccattgtttctataatatcaagttcctgactgctccatgtctttatcttcttgccgcctttcattatttccttcattaccgggcggttggaaagccaaaaagtagacgacatggtagtgagcgaagccttcatccttgtttcataatacccataatgtgcctggttctttgcagaagcaaccgctccaccggcaagacgatatttatcgcccggctttccatcaagtccttctgttggcgacaaaacggtattgattatacgaagacaacctttcttgacactaacattctctgccttgaaagttgcaggcggccgaccgttagtccaataaggacttttagcatgccatttagcggcattaagacgtttaccattgaattcatcagtataatcttcgttaactacccatttataaccctcaggagcctcaggcaaattttttatatgctcttcagccaaagaatattccttatcattttttaatgtataagatgacaggaataaagatgcagcagataaatacaatactgtttttctcataaactttgtcgttttagattttttgttacacgacaaaagtatataagtttcatgaaagcattaagggggatttacatcgtaaaaggtggggtaaaattctaccactccctgaaacacaattatttcactcatgaaaccatgtgtttttacgatatataaaacccgacagaagaataataccgtattaccggctaatttacataagaataacttttcaaaccgccatataccccactttacgtccgtaccctcagtcctcgactccggcaatatgttttccatatcgagatctatggttttctgcctcggattcaaccactaactgtcgagcatgtggattgcgtatctgtcatagaatctctttccgaaccatattatctcgtctgtgctaagtatgttgttcagacggataatctttccggtattttaccacctacttctcttgcaaatcctgatctgatataaccggatactctcaattcattgatttccgacttgtatacagtctgcgaagaggcattgaaactactgcacagactgaacagcagcaggggaataatttaactgattttaatagtagacattctgtgttcataatatttcattttaatgattacgtttctgactttcgtctgatgcaaaattatgaggtatcggacggggttgtatctttcagtaaaaatcagtaaagtcttggcaaggggtaaaaaacttaacatcttgtatataaatatattacaaacaaggtgcaaagattttcagtaaacgatggcgaatacagaacctatatatttacacgccataaaatgaagaaaaagcagtaggaaaaaaatgcgggcaagttccggataaaatgtgggcaagtttaaggtaaaacttgcccgcattttagatagaatgcgatcgcatttaaaacaagtaaaaaacgaagaaaaaaaatatgtgttcttcacagaacacatatttcaaaaataggtataaacacgctaaacaatgttaacaaaatctatttataaaaaaagctcacatcaataatatctgcaacatttttacaatactccataaatgaagagaccttgggatgatttatacacagagctatctgtgatgtaggcgaaaaacgtcctgtcccgtcaagaaacgctgtaagctcagatgggaggagtatactgccaatacctggatttacgtcagtcagaacgactgtatttacagcttccaccgctgacacatcaagataatcgagtgccggaagatctgcgaagtgcaattttcctatcatattgccgcctttgctgccctgaagagagacactctccaatgaagaacaaccggatatatggatttcactgtcgaatattgaagtttcggaaacatcatcattaagtataacagaaggaacaactaccaattgaagcgaactgttattctccaccctaagtactttcaatgatgatgcggaacttaaatccattcccaaaggtgtatcaatattagagattgaaaatactgaaactcccgaagacggcttgacatacgacatggaataatgcttggacttcactcccgaaatgtctacttttcctctgaaaccgggatttgacaatatatactccacaccctcaaggttagctgtctgcgacaggaaaatgaggtcgttcccttcggttatcctcttcgtgacatcaatctccaacgatgagacaaacaccgacgggaagtttctgtaaagatatgaacggagcaaaggatccggtactcttcggtttactgtatattcagtgtaatttccatcctcgtccgacatcacgacaagacatttgtccgtcatggctttatagaatgcaggtatgacatctgtattccattttgcaaagtaaggaagtttcagatttgtaagacttttacaaagcaccgtagtgccatcggttgaaataagattgagatacgaagttatgccgtcattgccgcgtaaagctaccgattttattccttcgggcaggtcagcaaagtcgaatatagaaaaactgttacactcaagattgacatctgcgagcgaaggaaaactcctcaaaccgctaatagatgtaagttcgcatctactcaagtccaaagaagtggtattgagaacttgattgtcacaaatcagctctccgttttcgctgaaattaaatcctttccgggtcaagacatcgcgtaactttgtatcaaaagtcacttcagacacttcaaagtcggaaatttctgtttcatccttacacgagattattgtgaaacagagaactatcagtacataaaagctaataaaattcctcataacaatcagttttgtggtaataagactatattatcaatccaagccgcgtcgttctgtctttcgcacacaatggcacacactacttttttcactgtagaattaaaatcgaaagatacggctttataattgccgggagaagaaaattcctctgtatataccgttcctgtagacatatcctgtagcatgactttcaacttacatgctccttcggtctttacatcagcagagaagcgataagtcctgccactctccatgtcaaccctctgcatgagtcctgcatgaccagatatacaggctacattattgcctgcattgtcagtctgtacgcaaaccgtaccatagttacccaatggctgccatgctgaaagtccttcgctgaaggttccattctgcaaggtagagacagtatatttctcaacctgcagtatcatggacgatacgtgacctcctccgtcggaaaaggtgatgtcgacattattatcgccattcttcagcagctgtatgtcgaacggtacttctatcataccgaaaaatatattgcggttgctctggccgtagcctttccagttgtcgggaacactcacagcggtaccattaatctttaccaccggtttcttggaagcagagacaggacggcctatcgacatacgcaagcttgctctgcccgaaccggactcgattcctgtgaaggggaacgaaagggatgatccggcggaaatcggtttcagatactcactgctgtaatatttattgcggattatggagttcgtgaatgctgacgaagacacatctgctacaaggactatggtctgatttgggacaattgagatgctttcaggcatggacgggacattctgttccgtatattctatacctgcgttataattgacatatagagaacgctttgtgacattcgatacatccttccagctattcttattgttcagatatacagtctgcgggttatcatcaagattatcaagggcgatatagagtctgcctccatccttgaatgcctgtacctgaatatcaggattactgctggttatatcaacacgttcgccttttacattcttccagagttcgaagaaatattttttgtcattaagcctccatgtggtattcttcagattctgaggattgtcgggaataaacagtgccgcactatatgaagtataattgtttgcagcggtgatatgccactcagccttatctgagacaaaaggtattgagataaacaaattgtcctgacgttccatcagattaaacagaaaatgattaaacgacgaaacactccgcacactgcttatgtcatcatagctgtcgtcgggcttgctgttgtcaatacctccaaactcggaaatggcaagaggcttgacatgtccgaacttaatataggaatacgcctcaaccatatcaagaactgcttcggagttacttcctgaacgtttcgtatcggtgccggttacatttattccatcataaagatgtacagagaatccatccatatatgcacctgcccgatcgatgaacattttcatgcgggtgttccagtaattgaagttcccatcctcccaggcggggtaggctgcggcatagcctatcaccttcatctttccgttaagacgcggattattgtgtatatgtttacctattgaagcataaaaatcgaccatcagttcgcgcatagcctgtccctgaacggtaaaaccggcatcatttgcatgaacgaacggttcattgaggggttcaaaaaactcaggtaccagctcgctgttggaataatactcagccgaccatgcacctgcagcctgaacgtctatgccgccctgtatgtgctgtacatagggatgctctgtggcaatatatctttttacggaaatatttccgctgtatggtttcatctgaggatatttgcctacctcatgcgtcttgttatacgcatacgagtatggtccccagaactttcttccaagaccgacctgatagtcggcaagaaacttgcctacatccttatcatcatcggaggtggaatgaatattgaaatatttagaacggtcgagttctgaaacaccgctcaaaaagcgacgggtattatagtcgacaaccacctcgttcctttcctgacaataaataccgggaggaacacctagggtaaatgccgataacagaaaaatatatttatagctcataatttctttccttttagacacagaaacttgtcagtcctgatgtggatacattattttctcactttcttatcgtagcgttcagtctgaagaatcatagtagccacacggcctccattatccgggaatgttactgacaccgaattttttccttttctgattaaccggtagtcgaaaggtatttctatcataccgaagaaatcgtctctgccggtctggtcatatcctctccaattgtcgggcatgtcgactttcttgccattaaccattatttcaggtttcttcgacatctcgtgcttcctgcctattgacatacgcagaacagctcttcctgtacccggtttcagaccatcgaaatcaaacacaattggttttccggcttccaccggctgaagataagtgttgctataatatttagtacgaactattctgtttgaatactttttacggatgatgtcggcacacaatattattgtctcatcttttataatgtcaatactttgaggcatcgagttcagcgtcttttcatcataaactatacctttatcgaaaatcatcttcaaagagcgcacagaaacattatctacacccttccaattcagtacgtttttcaagtttaccttatgtgtatagtcatcaagattgtcgacagctatgtaaagcctgtcatcgtccttaaaagctgccacctgtatgtccggattgtcggaaacaatatctacacgttcgcctttcacatccttccataacttgaagaaatatttcttgtcgttcagtttccatgcggtattcttcaagtcgtgaggattgttggcaacaaataaagcagctccgtatggttcgaaattatattgtttcgttatatgccattcggccttgtcagaaacaaagggtattgagatgagcatcttgtcttcgcgttcaagaagattgaacagtatatgattgaacgaagcgacagttcgtacagaggctatcggattatatcctttggaagtgttgtctattcctccatattcggttacggcaagaggaagaactttccccaagcggatgaacgagtagttttccataaggtcgagaatagcttcggaattacttcccgaacggcgggaactcttgcctactatgtttattccatcgtaaagatgtaccgacaagccatccatgtactccccggcacggtcaatgaacatcttcatagtattattccaatggtcgaaatcgcgcaactccatagccggatatgccgcggcatatccaatgattttcatttttttcagacttggctcagcgtgaatatgctttcctgtctgtgcataaaaatctgccatgagcatcctcatttcctgaccatgcatattgaaacatttgtcgcgtgcatggacaaagggttcgttaatgggttcgaaaaattcaggaactgcccctttcacatgcttggaatagtattcggcagcccatgcacccgccttcactgggtctatgccccattgtatggtacgcgcgttggcatgttccgtagcgacatatcgttttgtttccttcaaatcagtgtagttcaaaggcttttctgaaaaaggatattcgccaaccttttttgtcttgccatatgaataagagaacggtccccagaaagagcggccgattcctacaccgtaatctgcaagaaatttcctgacatctggatcagaatctttagatgtgtgtatattgaaatatttacctctgtcaagtgccgatacatcattcaggtatctctgagtggcataatccactgtgacagtagtgttataagtcttattctcggaagatgataaaggaaaaaccgagaaagacaaacacacagacaaagctgtaagaattatgttattcattgtattatcaaaatttaaaaggcagagaacactccgatagttcaattaaagtattccctgccattaagattatcacttctgtttaaacactaatatcagaaatcggccggtttgagtacatcgttcagcaccacttcatattcaacttctgttccgtcgttttcagtaacagtaagatggccgtaaccgccacttgagttattttctttcttaccttcaaacatgaacattctcttcttcgtcacttcctgttcttctttatcgcctgtttcaggattgataacttcttccttttcagtatagacttcattgaaagagaatgagagatgtttttctgtatccgaattgattttcagccactcgggcaattccgaaggagcctcagacgactcggcaaagaactcgatcttattcattctcaaagtctgatagtcattcttccaggcaatgaggtcgaacaattcgcgataaacagaaaacttggaaacctcgcctgtctttcctgtttccacattcttgagataggtaagttcatacacgggagtagaatcaagttcgacctcagcccatttgtcattatcacatgctccgaacaaaaccaaagcacataagaatgtaattgtcttataaattttatctattagcttcattgttactataatttattatggtcttacttcaatatatccgaaaaatatatcgtcaaaataaatattatccttaaaggcattaaagcgcatactgagcaatatattgtccatttcagcctttgaagtcacagtggttgtggccgacatccatttgctgtcggagccattcacaatgccgcaccatggtctatcgctctgccatgtcatatcttcagctccttctttacctgccggaacgaaatacggactcatacccttaccctgtttataccccggtgtataatatttgtagctgaaagtatatgtacctttaccaccagtaaatgtcttggagagtaatgccctgcatcggtcaaatgcttcgacaaacatacattttgcactgttgtttattccatccttcagaggattgtccacaacctgtgaaggaactacaggatgtgttttggtatcggcatcaataactttccagtcggcatatgtgtcagaattttcaaaatcttcatccaggaacgcaccaaaagtagtcgctacgtttggagctgtagcctttatctcaaggttctgatatccaaccaacgcttcagttaaagttcctgtaagggtcagttcatctgtgttatagattttctcaaccaaagtaagaatcagttcatatctgctttgcttgtttacttctgctgctgtgatgtttacgctacccctgacagctgacggtctgttatacgagttggagtaagtaagctttagagatgatggatttatctctttatatccaaactcagaattatccaaatctatagcaatgtgtgtttggtcaatctgacggatgttataagtaataggatcatcactaggtactactgtaatagccaaaggcacaacaagagtttttggcgaagcttttggagtgtacttacctttaccctcactggcagaagttctttctattgtcatggaaagaagcaatggcttatcgctgaatttctttgcagtgaactggtatggagtgtcaaaactggttaattcgtcatttacgccagtatccgcacatttgaaagtccatttgttaggcaatccgtatgaatcgtccttaatatagacagacttaccatattcaagttcgtatttttcgtattcgggagcttcctcagttccaccgactattccggtctttatttcctgtgtacactccggatcactgtatacctttacggccggtacgaggttaggatcatacacgcggatatggaaagttgtatccatcacatatacatcaccctcctgcttagcataacaatattttttgatatatcctccggtattgtcgtcatacaccgaatatggatatacaacctgtctgcggaaagtattgcacaaacgtaccgtatggtcaccgggtttagtgaaatacacatgtatggttttcaaatcgttggtatgagggatggattcatcaatcaggtttgtatagtctgtctgtccccactccatcttaccattaaggaactttgtaccatcatccgacacaacccactgatgcgacaacatgccttgggataagtccattatacttatatagttattaagattcagctgaataggtgaaacgttttcctgatctgtactcacatgccaggtacattcagccacgttattcaacggttcaaactcatcatccttacaagatgtcagaaccgagattaatgaaagagcaatatataaaaatctatttttcatcgtatttatttattaatatcaggatttgatgtaatttctatatttggaataggccagtatgccacttgcggaccgtagttcaatgatgcttggaaataatccacaaaagcgtttcctctcttttctggcggcagctcataaaatctgtactgctttccaaagttgaatgctgataccaaagcattagggtcatcaggattaggcttaagatatttggtctgaatcatacagtacttatattcgtcggatgccaactgatcaaacctttccttagttatattccagcgtctcaaatcaatgacacgtatggcatgtccttccatacacagttcaagaggacgttccacatacatcagatgattcattacatcacttgcagcatattccttctcatcgtatgtatatctcttgaattctccctgttccgattttccgataagcacaactccagcacggtgacgtaccttgttgatggcattgatagctgactgaacatttccatcgcttgcaccgcctttaatcagacattctgcatacatcagatatatatctgccaaacggataagacgatagtttattcctgaggccatagcaggcttaaattcagtttcactcttacgtgtatcccaatttgataattttctgaaatacgctgaagagccacggttgaattttgatacctgttgtgggagagactgataatatatcagactttcatcgccgtttattgcaagagaggcagatgcacgcatggaatagcttctgaggcgatatgcctgaccgtcttcccatttaaattccggaactatgtcatcgtagccggtaatcttattgtataaaactttattatctccgacagttgagacgagtcgttcgcgtactccaacatattttcctgctgttgcatcccacgtataaacgtacgttctgttatatacgacaccctgacggtccacctgcgagctgaaagttgttcccaactggtcgtatataatatccctatgttcaggatcaccataattgtcggactgcatttttatccagttacgttcatcaagtctgtccaccggctctgtttcgaatgcttcaacaagccaaaaagcaggaacagtgttaagccaggcatcgcccaagccatttacattcattccccatatattatataaggtagactccgaccatgtaccgaattctgtattatactgtgtagaataggaaacctcgagaatagattccgaattgaattcattggcagcagtaaaattatcgactatgtcatcaaccaaagcaaaacctccattatcaataatatccttaaaatattcggcagctttattatactctttatcataaaggtagcttttgcctaatattgcctttacagcccaagaggtgatacgtcccaaatcggttttctcccatttgtcattcaagccaaggtcaagagctttctgtaaatcttctctgtaatatttcttgatttcatcacttggtgtaacctttttatagtaatcttcttctacctctgcaatttcattaatataaggaacattaccattattgaatgaattattgagataaaaataaaacaagccacgcaaagaatatgcctgtgcctcaatctgagcaagcttggttatttgaggttcatctgtaacatttggacggattttctctatactggccagaacctgattcgcacggaacacaccagtatacagtgcagaccatttaccacggactgttccgtatgaatcattaaaggtttgcttataggcttcgttatcaaactgctttctgtccttattaccttcaactgctatatcacttctacggttctcatcgagcggatgataaatattggtatttttcaaagcattatatacagcagccagtcctttctcgcagtcgcctattgttttataaaaattctgtgttgtcagctgatgtatgttttcctgcgtaaggaaatcgtcgcatgaaaccaatgtcatgcccgacatcaacagactgaatactattgttttatatctgaagttcatatatttatattattaaaagttagaaattaatctggaatccgccacgcatctggatacttataggatatgttccatagtccaaaccacgacgtgacaatccattactaccgacctcagggtcgtatccgtcgtattttgtcagtgtaagaagattatcggctgcaacgtataaacggaacttgcccaatccaagctttgatacccaactcttggggaatgaatatcctaacataatatttttaagtctgacaaatgaaccgtcctcaatccacatatcagtatgagcacgatagttgttatgcccctctgtacgataagaaggaatggtagaggtatagttggtaggggtccacatgtatatcagttccttattggttcttctttgatatgtatatatcttcgtaccgtttattatttcatttccaactgaagcataccagttcatagagaaatcgaagcctctatagtcggccgagaagttcaaaccaagttcataatccggcataccactaccggcataaacacggtcgtcatcattaagaacaccatcattattggtatcgatatacataaggtcacccatacgggcacttgactgtaatttctgatattctgcaagcttctgttcagtattgattacccctgcggttggcataacaaagaaagcaccggcttcatatcctttcttgattgcagttacataatcacttcctgatgaaacaggtttaccgtcggggaagaaatataactcattttttcctgccatagacacaatctcattcacgtttttggtaaatgtaccagtcaagctgtaattaacaccacgtattttgttgcggtgagtaagtgaaaactcaacaccacggttttccatatctccggcattcaatgtaacagttgaactctggccccctccatttgacggtggcacgaccatcgggaaaagcatattcttcttgttactcttgtacaaatcaagacctaagataagcttgttattatataaagccatgtcgataccggcattaagctgctgggttgtttcccatttcacattcggattggcaaatcccaattgggtaaaaccatttgcaagaatttcggaagttccggtaccaaaagtatagtcgtagtttttgtatatagctggtgcgtatgaataatcagggaagttctgattaccggtagtaccatagctgaatcttaattttaacgaatttactagccacctgaatctgtcgaagaatgattcctcagaaatattccatcctacagacaatgacgggaacaatccccaacgattttcttcggagaacttagatgaaccgtcgcgcctgatactggcacttgccatgtatttgtctgcatagctatattgtagacgacccaacataccaaccattgtactgatacggtcctgtccccactggccactgcctgtacccacagtcatatcggatgttcccgcatttaggttcggaatctcgttagtaaccaaatccattatactggcatagaacatctcgtatgtatatttctccatactgaaaactccggtaaatttaatatcatgcttttttatcttcttattataatttaccattgtttcccaagtgagactggtattctttgaatgagtatcttttaattgcgaacggtaattagagctggttaccttttcgcctttctgattatatacctcaaactcaggtcgaattgagacagctttctgattgttatatccaaagcccaaacgtgtggaaacattcagtccgggaattacattataagcaagataaaaattaccgttaaatgattctgtgtccttatgattttcctctttcaatcttcccaatgtataacttacgccctgtaaatctgcaggatcgccagctgcatttactatacttgcctgtggataaatctgagaacgagtaggcgagtagtcataacattcgttcaataacccccaagccggagataactggttttctatcttcatagcgatgttagtgttgatagtccattttccgcgctgaaaatgtgtattcgaacgaatattatatcttttgtaatcggaatttatcaacacacctttctggtcgaaatagttcgcggtaaggttatatgtcaaatctttcttgccgccattcgcagtaacagaataattctgtattggtgcgttattattgactacatattcatataaactagagttgttgaagaaattcacaggatatgttttcagattagaccaggccaggtcgtctgtattctggtttccttccatcattctgttagacatcacttttacaaatatactctcgttggcatcaagcaaatgaatattcgaagtaatgtgctgtacaccataatatccgtcgacagctatcttcatttctccttccttacccttctttgtggtaataaggataacaccggaagcaccgcgagtaccataaatggcagccgaagcagcatccttaagaatatctatacttgctatttcgctactactcaatcccgggtcgccctcgaacgggacaccatcgacaacatataaaggagaactgtcgcctgagatagaacttaaaccacgaatctggatgttggatttggctccaggctcaccagaacttgcctgaacgttaactccggcaaccataccctgaagagctgtacccaagtcggaagtactgatcttagtaatctcatctgagtttacacgtgccactgcacctgtcacctcttttttacgcattgagccataacctacaacaaccacttcatccaacacttttgtgtcttcctgaagcttgatattataaatctgaccattcttgattgcagcttttacagttttatacccaacaaaactgaacactaagttacctttagtcggtaccccttgaagaacgaaattaccatccatatcagtaatagttccaagagaagtaccttcaacttgaacagctgcgcctataacttcaaggttattggcagcatcaatcacctttcctttaactgttatcttctgtgaatacatagacaatgtatagaagataagcatcacgaacaacatgtacctgccatggtaccattttttctgatttctcatttgtaaaaattttaatttagcaataggttatgaaattccttttataactgacgctaaattatttatttataatggtacaaaaggggagaattatatatttaaaaagggggtaaaattttacccccacttatattaagaatccaaatcggtctgtatactctgttctttgtactgttgcggcaatacaccgaattctttcttgaaacattctctgaaatacttcaaatcattgaaccctacatcgtatgtcacctctgatacagaataccgtcctgtcttcaacagttctgccgctctcttcattcttattgaacgtacaaaagcattggctgttactcccataagtgctttcagcttcttgttcagaaccaaggccgtcacgccaagacctttacatatatcctctatctggaacgaagagtctgtaatgttgtcctctattatctttacaagtttctcaaggaacttatcgtcggtagatgtagtgcttacctcggaaatctttattgccggaactttcttgtgttgaagaatccgcttcctgttggttataatggaattaagcagctctttcattatcttgttgtcgaaaggtttagggcaataagcatctgcatggaatttatatccgatgaaataatcctgcaatgtagtcttggctgaaagcaatactacaggaatatgagatgtccttacatcctgcttgattctctcacacagttccagaccattcatgcccggcatcattatatcggataaaacaagatccggttgcaaatctggaatcatgttccatgccatctccccatcatgggctatcattatcttatacttatccgacaacagtaatgacaacatattacatatatccttattgtcatcaacaatcaatatagccggagattctccgtccacttctatgtctatcatctcttcatgctcgcacgattcacttcttaacacatcagcaaacttttcatcctccccactgttggcagagatattctccgtaaccatgtccccctcagttatcataggaattacaacatggaaaacagtgcctttaccttcctctgatacaaacgtaatatttccattatgtatctctacaagccgcttggtcagaaacagacctataccggtacctccttcagcagagtttttattctgactgtagaaacgctcgaagaggtgtgttttcaggttgtcggatattccgtttcccgagtctgccacagagatgtttattttgttatcctgttcattgacagtaaacgatacaaatcctccggcaggagtatgcttaatggcattcgatacgagattatagattatctgttccataagatgagggtcgaacagaaagcttatatcactgcgtgagacagaatattccagccctacacctttctgttttgcccaatacgtgaactgctgaaatacttcttttgagaaagacgagaagttgccatatttgagattcagactaagcattcctttctcgctctttgagaagttcatcagctggttgacaagacttaacaggaacttactgttatgctccattgtctgcagcatgccggcaagatacttgtcggacgaatacttgcccgattcaataatcatactaagtggagaatgaataagtgtgagtggtgtcctcaattcatgcgatatgttggtaaaaaatgtagtctccttttcaagaagttcttcagtcttgcgtttttccatgtttgctatatatagagcatttctgcgctgcacccgtgaggtataatacaccttgaaccggtataaagacaagacaagcaatataaaatagagtgtataggcataccatgtacgccagaaaggagggttaataatgacaggtatggaaagttcattcaaactgtagactccatcgctattcctgaccctcagtctgaacatatattcgcctgaaggaagctttgtgtagaaagcctcacgatgaaaagcggaggtggaaatccatgaatcatctacgccttcgagcatatattcgtaaccaaccttataaggacttctgtaatccagggagctgaactggaatgagaaagtgtttaaattataaggcaattcaatgtgctctgtaaaacttacacttttgtcgaaataagctgaatatgtggaatctgcctcaacgctgtgattgaagattttaaaatcaacgagtgtaggactaccgttgaaatctatcacatcaaagtcattaggtctaaagacgttaattccgtttacgccaccgaatatcattgttccatccgtcattactccagcagaaagttccataaattcataatcctgaagaccatcgaaaatatcataagatcttattctctgtgtgttgatattcaacgaattaattcctttattggtagaaatccataatgttccatccgtgccattaacaattgattttattgtattgctgctcaacccgtctgcagagctaaaattttcaacgcaggcattatggttttcatccaaatccacgattttccttaacccacgtccaagtgttccataccagatattatgattcaagtcttcacatacaggcactatatagtcgagttcatcaagtcccttgactgagttcaaaacaggattatctatatacaaatctgcagattccaatactttaagaccgaagctggaagctacccatatattacccttatgatctttaatgatgtttcttactatcttaagttctttattgtcagatgttttgatttccttcatcacacctgtggacaaatcatatctgaaaagacctttattatatgtgccaatccacaaatattttccatcggcaagcattgcgcgcacatttctcaaacctgagatctttttataatcattatcagaagtgaaactgtaaataccatcgtacatcagagacacatacatgcagtcggtgtagtttgagtatgctgttgagtatactatcctgtttgccgtgaaaggaataagtctggcattaccggtaatggaattaaaatgatatagccctgagccttctgtgcctaaatatatatcagatttggcaaatgtataaacggacgatatatgatcatttcctattcctctgaataaatctataggtttattattttcgcgtatactcataaagccactcttgaaaaatcctatccaaagaatatcgtttttatcaagaactacagtttgcggatagctgtaagaatatgtagcaataacctgtggttttgactcgatggcatgcaatacatcaaaagtcaacacattcacagtgcttgtagtggcataaaataatcttttgtttttatataccatttttcgtatatcacagttttccaacagggtacttaccttgcaggtatgcttgtcgtataaacataattgatgattttccagatttgagtacaatatttgagaagatgagatgactatggctgaagctatagggcatcccaatagtttgttaagcagtaattcatctccatcgacgttacattcgtacaggccgtcttcggaggagagcattatcgtattatctatttctatgatgtcggaaatgtatggtaattttaatgttgatcttaagacagtatttattttgccattttgaaaatcataatttacaaggtatatactttcatcagaggaatgaaaccagactctgtctttagagtcgacaagaatcttatcgcaagtgaaatttttatcaataccgctgtgaccaagatttaatgaaacgaattcgttctttacagaattgaacaggaacactcctctatcggctgtacctatccacagatttccatgtgaatcttcgtcaatacatactatcagattactgttaagaccgtttgactgatatccgtaaaccttaaattcatatccgtcaaacctgttcagtccgtcgttcgtggccaaccatataaagccttttgagtcttgataaatacattgcacatcattttgggaaagtccatcaagagtagtgtactttcttgtgacaaactcattggatgcaaaggatttgcaaactataatcagaactgatattaaacttaagattaatctaaacatataactattattctttatatttcatcaagattacaaagttattgattttatctaaaacatcaagtatttacagtagttaatagataattatagatattttccactttagaatgcgtatcaaaatcaatcaagaaaaaaataaatctttaacttcatttcatagtataaaacaaaaaaagcatcgtaccattacactcaataatagatacgatgcccgaaagaaattacagtaacagactgtattgggattgttcttaaaaagacttatctgtatgactttatatatatgtcgagtatttcggtatccgacagttcatgagggtccagactgaacaatgcacccatggcagttcgcgcattatcaatcatcttagggaaatcttcctttactattccccagtcgctaagcttcaaatcgcggacattgcattccttctgcattctcaccaaagcatctataaaatgttcgggattaaggttcttgcatccggtcataacatctgccatgcgcatatatctctttgtcctgtcataaataaaagtagagaaataggcctcgcttatagctatcaggccaacaccatgaggaagagcgggatagtatgcgctgagagcgtgctcgagagaatgttcggaagtacaactggatgtggattcaaccattcccgccagcgtacttgcccaagccacctttgccctcgctttcaggttatttccatccttcaccgcaacaggtaaatatttatacagcagtctgatggcctcaagagcgaaaatatcacttattggggttgcacaattggcaatatagccttcggctgcatgaaagaatgcgtcgaatccctgataggcagtcagatgtggcggaactgaaaccatcagttccgggtcgattatcgacagacatgggaaagttaaagtggagccgatacctatcttttcgtttgtttccagattggttatgacagtccatgggtcagcctcggttccggttccggctgttgtaggaatggctatgatgggcaatgctttgctgtaaggaagccccttgccggtacctccttcaacatattcccaataatcgccatcattacatgccatgattgcaatggatttggccgtatctatcgaacttccgcctcccaaacctataatcatatcgcaattttcctcacgacagattgccgtaccttccattacatggtcttttattgggttaggcaatatcttgtcgtacaccacggcatcaacattattttctttcagcagaccaatcaccttatccagataaccatatttacgcattgatgttccggatgaaatgactatcaaagcctttttgccgggcaatgtctctgttgaaagacgtttaagttcgccacatccgaagagaatcttcgtcggaatattataaccaaaaacaaaattattgtccataaatattatcagtcagtcaacttactatcttaaagcctcatcaatcactttcttgagttcaggataagcctcatctgtatcgcccacctgttttctcaactcacgcagtttctttttcatgtccttaagaactttggcgtatttaggattatcagccaggtttaccatttcgtaagggtcgttcttcacatcgtagagttcgaaagaaaccggagtaggaacaatcttgtggctgttcttcaaccatgacattgatttctgtccgtaacgtttgtcgtcgtaatgacggccatagaaaagtatcagcttatagttttccgtgcggatacctatgtgtgccggaacgtcgtgatgaatcatgtgcatccagtatctgtagtaaacagcatccttccagttttctggctttttgccttcgaacacagaggcaaagctctttccatccatgtatgaaggttctttgccaccgaccatctctataagagttggagcaaaatcaatgttgttaatcatcaggtccgacttggctcccttgtaaggacatctcgggtcgcggactatgaaaggcattctttgagattcttcatacatccatctcttatcctgcagatcgtgttcgccaagcatcataccctggtcgcctgtatatacgataatggtattttcccagagtccttccttcttgagatagtcgaaaagacgtttcaggttgtcatccacaccctttacgcaacgcagatacgatttcaggtaatgctggtaggcaaggtatgtattctccatttcatcacctgtattgcacttatattccattacataattgcggatttcatgacggcttgagacagaagttccgatgaagtgacgaagtgaatcgttcttgcctcttgtgccttcggagccccatttgtctgtatcgaacaatgacaatggaacaggcacttccacatcgtcaagataatattcatagcgcggtgcgtactcgaacatatcgtgcggtgccttgtaatgatgcatcatgaagaaaggtttggacttgtcgcgtctgttcttcaaccagtcaatagcaaggttggtcacgatatccgaggagtaacccattttctttatctggttattaggccatttcttgtcagttacgtcacttgtaaggaaaatagggtcgaagtattcgccctgtccgccatgaccgttgaatacagaataatagtcgaagtgcgacggttcgcatcccaaatgccatttaccgatcatggcagtctgatatcccatattatggaactcatcaaccagatattcctggtccggctgaagcacttcatccaaagtgagcaccttgttacgatgggaatactgtccggtcatgatacatgcacggcttggggtactgatggagtttgtacagaaacagttctcgaagagcataccgtcccttgccagttcatcaattgtaggagtagggttcagtactgcaagacgacttccgtatgcgccgatagcctgcgaagtatggtcgtccgacatgatgtagatgacattcatctgtttctgctgtgctgcgacaccaacacatacagacaggaatggcataacagccattcccttcattatattattttttaaattcgttttcataagtcagattatcattgaaatagaacttgcaagacatatcatcgaatgattttacgtccttattctgcattttaacccattgttctgatttagccttgacagcgacctgagttgaaacctcattaccgtcgactacacttttaagagtgacatttgcatcctctgcattatggtttgccacacgtacagtgataaggcatccgttatcaaccttatcgtatagcggtttggaaaccaccgcccctttaagcttaatcttgaacacatgtgcatattcagtaggtttgttcttagggaagtttactacaagaccctcgtcagtcatcttatagtcaatcttctctgagcttccaagcatttcaaccgactcaatttccacgttctggcaatacttaggagcaaatgacttgatagtaacactaccatctgtccaagccagagacacggcatagaggttattgtcgcgtgtagtaaagcgaatgtcgtccgctgtatattcagtttttgtattgtctgtcatataacctgcggtgcctgcgttatgtccttcgaaagcaatcacccatggtcgtgagccataaatagcctcaccgttagtcttcaaccatttacctatctcggcaagtacgttcttctgttcgtctgtaatagtaccgtcggccttaggacctatattcagcaataagttaccgttcttgctgacaatatcaacaaagtcgtcgatgatatggtcaggactcttgttttcctcgcccacacaatagctccacgatttcttgcctacagaagtatcagtctgccatggatattcacggattctgtcgctcttacctctttctatatcgaacacctggatattgtcgccatatccgaatttagtgttaaccacaacttctttattccaatcaagagccgaattgtaataataagccatgaatttatagaaagtaggctggaacggatattttcccacagtccagtcgaaccatatcaattcaggctgatatttgtcgataagctcgtatgtatgcataaggaactgacggcgtgaacgttcgttcgagccttcatacttaccacaataaggtgtcataccctgaccttcgggctcatgcagtctttcgccatacagagtgattgtagtgtcctgaacatcagaaggagtttccattccatattcatagaaccatgcattctcgcatctgtgagaagaaagtccgaaacgcagaccggctttcttggtagcttccttcaattcgccgattatatcccttttcggtcccatatccacagcattccacttattgaaagtactgctgtacatggcaaatccgtcgtgatgctcggccaccggaacaatgtattgtgctccagatgattttaccactgccagccactcgtcggcattgaaattttcggctttgaacatagggatgaaatccttatatccgaatttggtcaaaggaccgtaagtctgtacgtgatacttattaataggatgaccttccttgtacatccagcgggaataccattcactgccgtatgcaggaacggaataaactccccagtggataaagataccgaacttggcatccttaaaccattcaggaatagtgtaattttgagcaatcgatgccgaatcggccttgaacacatcagtaccttttaaagatacagtagaatctacattaggagcgtatgtagaattgcacgacgccaacaggcttaatgccgcaactcctaaaaccgttttcatggatttcttattcataataatcttattacattaaataatgacattaattttttctgtaagcaaagatacacttgagttccatttacaataaataatttaattactatagtaaggggtaaaatatttaccacctattattgaacaaatttaccccctctcatatatgataataaactgccaatatcgaattacaagtaaatatatatttcaacaaaaaaggtttagcctattattacacaacaatttcaccctaagaataaaatatatatagagtaaatttgccaatataacaaactgtaaaaacaaatttatgaaaaactatttgatttacttactcgcagcagtatcgtgtacaactgtagcagacctaaatgctcaagtcagtacaaaaacaggtaatgaaaccacagaacttacaattccgaaaaagttctacaaggacagcattgatttcagcaatgctccgaaaagacttaacaacaagtaccctctttccgaccagaagaacgaaggcggatgggttctaaacaaaaaggcctctgacgagttcaaaggaaagaagctgaatgaggaaagatggttcccgaacaaccctaaatggaaaggaagacaacctactttctttgcaaaggagaatactacatttgaagacggctgttgcgtgatgagaacttacaagccagcaggatcactgcccgaaggatatactcacactgccggtttcctggtaagcaaagaacttttcctttacggatatttcgaagcaagactgagaccaaacgactcgccatgggttttcggtttctggatgtcgaacaatgaaagaaactggtggactgaaatagacatttgcgagaactgccccggcaatcctgccaacagacatgacctgaactcgaacgtgcatgtatttaaagctccagcagataagggtgatataaagaaacatatcaacttccctgccaaatactatataccattcgaattgcagaaagactttcacgtatggggacttgactggagcaaggaatatatccgactatatatagacggagtactgtacagagaaatagagaacaagtactggcaccagccattacgcatcaatcttaacaacgaatcgaacaaatggttcggagccttgccggacgacaacaatatggattctgaatatctgatagattatgtaagggtgtggtacaagaaataagaaataacataatctgaaattataaaaggcagtcttcattatcagtatgctgatgataaagtctgcctttttaacaagaagataaagattttaatctgccctatcactcatttacttcatccggatactctgtaagcgagtttcccgaattgcttatttcaatagagccgataggaagataattgaacttcttgctccatgcagagataccataatctcttctaagaataggcatcatgacctcctcggcacgtcctgagcggacgaggtcaaaccatctgtcaccctcgcatgccagttcacaacgacgctcataccatagaacatcaattacgcttttaaatctgtcaggatacatctgcattagcttgtcaacatcaatataacttccgtcgtctgcatgaacatgcttctttctgagttcatttatgtaatacttcgcttttgcttcatcaggattagtacctctgagatatgcttcggcaagcatcagatacacttcaccatatctgatgacccttacgtttccaggcttgtttagattggggtttcctatcatatcgtaatttttgaaaggaggatatttcttctgggcatatccctggaaatcaggcccgtaagagcctgtctcccaaacaactttttttgattcatcctgaatattggcattaggtttggttacaagttcatcgtaagtaaatatcgccgcatcacgacgcacatggtcatccggaaggaaataatcatacaattccttagtaggcagacaaaagccatatccattatcataatcaggactatttttcaactgtctcggtccgcagaaagtcacccacatagcaccttcgcctgcatcaatattaccccagtttgtattaccagatttggtagaggtctgtatttcaaatatagattcctcgttattctcctgatgagccgcaaacaatttagaataatcatccgtcagagtataattaccacttgaaattacatcctccaataaaggtttcgctttgtcaaaaatcttagcatcatcgttgctccagtcagcccaataaagatagaccttggccaacagggcttgagccgcagtcttggtaatacgtcctttcattgtgtccgggaaattatcctttagagaagggatagcttcaagaagatctttctctattgctttatttacattttcgcgagtatctctcgtaaacttgaatccttcaggataaagagtctcaagactgataaagcatggaccataatatctcaacaattcaaaatgataccaagcacgtaagaacttagcttcagctttataaactttagcttccggactgtcatactctgaatttattacaagattacatctatatataccacggtaacgagttttccacaaattatcggaaatagaattgacactcgtatttgaataatcctctatagcctgcatgtaaggctgatcctgatcagagccaccaccagtacgagcattatccgaacggatttcacccataggtacaatggaagcaagtgcattacccgaagcaccacctatgtgagctaacggatcataacaagcagtaagcgctttgaacatctgttcatcggtcctataaaaagaactttctgtttcggacattataggagctgtatccaggaaactgtcgctgcaagatgatgatgcaatagcagcaaacatgaggacaagaatattattatgtattttcgacttcataattttcaattttagaaattaagacttaaaccaaatctgaatgtacgggcctgagggtaagtaccatagtcaatacctgtgctaagaatattgccacctgccatatttcctacttcaggatccataaacggatagctggtgaaagtggcaagattatcaattgctgcataaattcttgctttattcagcatcaacttgtttattaatttagttgggaatgaatagcctacctcaagtgaagaaatctttaaatgcgaaccatcataaagataaaaatcggatggtttgccaaagtttccattaggatctttggatgaaagacgaggcactccattatcatcaccttctttccgccatctgtcaagatagaatgatggaaggttgctgcgtccgtatgcttcctgtcggtaaatatcagagaagactttatatccagcttttcctgttaagaagattgtcatatcaatacctctccagtcggcacctaaattcaaaccgaatgtccattttggccaaggattgccacaatcggttctatcttcatctgtaatctgcccatcgttatttgtatcttgccatataaagtcacccggaacggcatcaggttgtatcactttaccgtcttttgatttatagttctgtatctgctcttcattttggaatattcctaagttcttataaaggcggaaataacccatagcatgaccttcctccatacgcgttacattaacagatgttctccagctaccaccatcagtatatccatttacatttcctatctttacaacctcatttttaagatatgaggcatttgcggaaatagagaagttgatttcgttccaatttttattaaatgtcatctgcatttccacaccctggtttgttatattaccaaggtttctaaaagctgcattattacctctaatggcttcaactgttggctggaacaacaaatccttagtactttttttaaaccagtcgaaacttgctctaatcataccattatagaatgtcatatcggcaccaacattaaattgttcagaagtttcccatttcacgtctggattaacaaggttattaggagcagatcccacagtgatggcattaccaaacgtgtaattataattattgccaataatagaagtataggagaatggagaaattcgctcatttccgttctgtccccaagagaatctaagtttgaagacatcaaagttcttaattttccagaatttctcatttgaaacattccaacctaatgaaacgcccgggaaagtagcatatctgttattgggaccgaaatttgaagacccatcgcgtctgaccacaacttccgccatatatttttcagcataattatagcttagacgagcaaaatatgagaacatactatgtctaggattagcaccgccactattagctgatgtcataacatcaccagcattaagataccagtaattctcattggtcattgcttcatttggatatttatttcgtgttccggccataaactcataaacatctcttgatgcagaagtacctaacaggacagatgtagaatgttcaccaaaagattttttatatcgcaatgtattctcccactgccaactactattagcatttgtactttgttctaccctagaattatcttctttacattctgcagaatgaaaaaactttggtgcaaacattcttccacggaaattccgatgattaataccaaaatctgtgcggaaaacaaggtctttaataaaagtgatctcagcataaacattaccaaaaaattgctgggtaatatttttattcttaggtgcctcatccataaatgcaatagggttccacatacggctataaggtacaggagagactccatatccgaaagtatcgttgctattctcatcataaaccggagtagtaggatcaatattataggcgtatgatatcggattataaccattgataccggttgccactccactattctctatatatgcatagttgacgtttgcacctacacttaagaaatcatttatagaataggaactgttcagccttgtgctgaatcgtttgtaaaatgacgcatcttcaccgataataccattctggtctagataattcaatgaaagcaagcttgaacccttatcactgccaaagttagcagtaatgttatgctcagtaacaggagctgtattcaatatttcattaaaccagtctgtattataacctgttggagcagtaggtacaccaccggcaagcggcatatcatcattgtcggcaaactctttcatcagcataatgtactgttcatcattcagcatggttggtttctttgctactgtagagaaaccatagtaaccatcataagcaagcgatgtctttcctttctttcctttctttgtggttataaggactacaccattagcggctctggcaccataaatagcagctgaagttgcatccttcaagacttccatgctttcaatgtcgttgggatttacactgttcatgtcgtccataggcagtccgtcaattacaaaaagaggattagagtttccatttgtaccaacaccacgaattaccagcttcggtgctgttcctggctgaccggaatttgtcacaacgttcacaccactaaccctaccgctcaatgcattcacggcatttgctggtttagattgcaataaatcatcggaatcgatgctactgatagcacctgttacaacactttttttcttaacctcatatcctattgctacaacttcctcgagtgcaatggcagatgtttttaattgaacgtctatcttagactgacctttatacactatattctgtgtatcatatcctacgaagctataaatcaatgtcgattccattggtacattttccaagatataatttccgtccaaatcagaaataataccgtttgtggtacctttaactaaaatacttgcacctatcacaggtaaaccatcggagtctgttatacaaccggtaactttcccgttctgtgcatttaatggtaaactgaacgttataagaatcagcatacacattaatgatagtgttctgttcataatctagagttttttgtaattagtgtttttcttaaaataaaaagttttgttctatcagttgcgcgctacttactgacacttgcaaatatatatactatgtaatataaccaaagggggaaaatttcatttaaataggggggggaaatagattaactaaatattttaaggaaaaatggctgttagaatccattcccagactccaacagccattttatcactaacaatcgcctgttaatcaatatatttttctgcccatttccttaagatttgcatccctgcccagtggaacaaaagtaaatccgtatgaatagcttcccttcagaagacgcttgtctattgaaggacgggctttcagactccagctatctgttccgcccactccagcctgaaccaggtcgatattaagagtattagaatacaagtccttttcaagttcatttatatgtttagccttatcaatcgcattctgcgacatctcccacactgaaacagataggggttcatcgccgacaatcatcacacctgccttatccgactgcaaggcaaaccatctcacgtcacaacggtttccgttttcctgcggcattacatagtcaaatcccagagcggacaccttgcagttatatatagacaccattgcagaggcttttctgtcggaatagttttcccatgggccacgtccataatatgtcacatccgacaaacgattggtacattcgcattgcaatcctacgcgcaacatttctgatatttcaggagacttcatcattgaataatgaacgcctattgttccgtctgcttttactttataattcaaggtaagtctcagtctttcatctatagcctttagcaccttaacctcaagattgccttccgatttgcgtacatctatagaaactgtctttagctttaatggagcatctttccagaatgcaaacagtctatcgaccttccatcctcgccagtcattgtctgttgacgctctccagaagtttggtttcagagcagatgtgatgatactttcattatctatcttatactgactgatataaccatcactgatattcagataaaagttctttcccttcacgctgatgtctttcttgttatctgaatcgatttccatatccaatgtagtatcaacgcattctactatctttggtaaagaaagatacttaaactgttcccaggcaacctcgtatccagctttggcatacagattgtcattcttgagcctggcactcaggaataaccaatattccgcaccgtcatcggccttgaaattctgaataggaagttttagtttacagctctcaccagctggtgttgtcggcacaataatctcaccttcctgcaatacactgtcttcgtccttcaattgccaaaaataacgatactcatctgttgaaaggaagaagtttctgttttttacagttatctctccactatagacattatcagttgtaaatgatacaggagcaaacacgtacttgcattcctcagtagcaggtttaatggagcggtcggcactgataacaccatttatacagaagttttggtcgttgtgctcccctttctcatagtcaccaccataattccatgatttcttattatatttccgttcattatccagcaatccctggtctatccagtcccaaatatatccgccggcaagcgcatcatgagaacgtattgcatcccagtattctttcagcccgccggtagagtttcccatagaatgtgcatattcacacattattatcggacggttcatgaccggattcttagtcattgctataagctcatcgaccataggatacatacggctaatgacatcgacgtataaaggatcatcgggattggcatacacacaaagctctttctttgccggtttgacatcttcgttcacattaaaatctatctcactagtaacgattgacgcttccttacgtccgataggtttgtataaaggattttccggctgtccttgcgccccctcgtaatgaacaggacgggttgggtcataatctttcagccatcctgacagagctgcatgattagggccgcatccagactcgttgcccaacgaccacataaacacagaaggatggttcctgtctctcacagccattcttaccactctctccatgaacgagttagcccactcaggcctattggacagataccccctttgatgatgagtttcaagattagcctcatccattacgtatataccatacttatcgcacagttcatagaaataagggtcgttaggatagtgcgatgtacggactgtattgaagttataacgcttcataagcagaacgtcttcgagcatctcatcacgtgtaacggtcttacctccggtctcgctatggtcatggcggtttacaccaatgagtttaataggagtgtcattcaccagaatctgattacctgttattttaatatccctgaaccctaccttattacttctcgcatccaccacgttgccctttttgtctgtgagctttataaccaaagtgtatagataagggtgttccgaattccatagttttggcttagaaacaattccctccatcattccgtaataaacattatcacgctgaggataaggttcgttcaccacataatcggcagtaacggtaatgtcttttccaaacaccggtttcccatcggcatcatataattgggctgacagattccatcccttcaaatcatccatattctgatttgttatttccggacggatctgtaaccgtgctatattcttccggaaatcgatgcgtgtccttactccataatcatatattgccacctgcggaatggacatgatatatacttcacgatggataccagccattcgccagtggtcggcatcttccatataacttccgtcggtccacttatacacttgcaccgccagtttattctcccccttcttaacgtattcggtaatatcaaattcagtaggcagacaactgtcttcggaatatcccaccttctgtccgtttatccatacattaaatcccgaatagacgcctccgaaatggagtataatcctgtcgctcttccacttgtcaggaacaacaaactccttgatataacaccccgtctgattattcctgtcaatatatggcggacgagcagggaaaggataaatagtatttgtatatataggatagccatatccctgcatctcccaacatgaaggaacaggaatagttttccatgatgatgaattgtactccactttataaaaaccggcgggagccaatgccatatcctcggaaaagttaaacttccattggccgttcaacgacatatactccgatttctctctgtctccatccaaagcccaatccactctccggaaagaataagtagtactgcgggaaggcaaacggttaattccgtttatggtctgatcctgccatacattctgattgtttctccactgattggcaccgttgtccgatgcagacagaaattgcatcatgaaaaataacacagaaaatgaaaaaatagattttaagttcaagttcataaattcgcattttaagtttctatgcaaatatataagtataacgaacaatgaatagggggtatttctatctatatagagtggtatttttacatatgagctaaaacttaaaaaaaactgtcagtattactatgctatgtagcactctatatgaaaatattatatattcccaagtcaaaagccttttcaaacaatttttatatattctcatcctatcccttccatcaaagataaattccaatcctgatttgccagccgcatttattccttttttcaggagaattttctttatggctatcgccatgaaaattcacctgaaaaagaatgcggcggcaaacggattagaattaaagaaaagattacagggattaactgcgaccgacgtgacgcatagccgtaattcaaaggcggctatccttatattccatatatgacctcacaaatactgtgaaaatccactttccccaataacaaaacatagcctgccatatcaacacccaaaa

SEQ ID NO: 34 - DNA, 10099 bp, Artificial Sequence
  P_por10-cysS biocontainment plasmid
gaaaataaactaaccatttacaatacattaagccgtcaaaaggaacttttcgttcccttgcatgcccctcatgtaggtatgtatgtatgcggtcctaccgtatatggcgatgcccatttaggacacgcacgccccgccatcacgttcgatatcctgttccgttatcttacccatctgggatacaaggtacgttatgtccgtaacattaccgatgtcggtcatctggaacacgatgcagacgaaggcgaagataaaatcgccaaaaaggcccgtctggagcaactggaacccatggaagtagtgcaatattacctcaatcgctaccacaaggcaatggaagccttgaatgtacttccacccagtatcgagccacatgcatcaggccatatcattgaacagatagaactggtagaagaaattctgaaaaacggctatgcttatgaaagtgaaggttccgtttatttcgatgtagcaaaatacaacaaagaccatcattacggcaaactgtccggccgcaacctggacgatgtgctgaacaccacccgcgagctggacggtcaaagcgagaagcgcaatcctgccgatttcgccctgtggaaatgtgcacaacccgaacatatcatgcgctggcccagcccgtggagtaacggattccccggttggcattgtgaatgtaccgcaatgggtaagaaatacctgggcgagcatttcgatattcatggagggggaatggacttaattttcccacaccacgaatgtgaaatcgcacaaagcgtggcttcacaaggagatgacatggttcactattggatgcacaacaacatgattaccattaatggacagaagatgggaaaatcatacggcaacttcattaacttggatgagttcttccacggtacccacaagttactgacccaagcctacagccccatgaccatccgtttcttcatccttcaggcacattaccgcagtacagtggacttcagtaacgaagcattacaagcagccgaaaaaggattggaacggctgacagaagctgtgaaaggtcttgaacgcatcactccggcaacacaaaccaccggcatagagggggtaaaagacttgcgtgaaaagtgttatacagccatgaatgatgacttgaactcaccgattgtcattgcccatctgtttgacggcgcccgtatgattaatacggttctggacaagaaagccactatttccgcagaagatctggaagaactgaaaagtatgttccatctctttatgtacgaaatcctgggtctgaaagaagaagccgccaataacgaggcacatgaagaggcatacggcaaagtagtagatatgctgctggaacaacgtatgaaagccaaagccaataaagactgggctacaagcgataaaatccgtgatgagctggccgctcttggctttgaagtgaaagataccaaagacggtttcacatggaaactgaataaatagaaacggcgcgcctgataggtgggctgcccttcctggttggcttggtttcatcagccatccgcttgccctcatctgttacgccggcggtagccggccagcctcgcagagcaggattcccgttgagcaccgccaggtgcgaataagggacagtgaagaaggaacacccgctcgcgggtgggcctacttcacctatcctgcccggctgacgccgttggatacaccaaggaaagtctacacgaaccctttggcaaaatcctgtatatcgtgcgaaaaaggatggatataccgaaaaaatcgctataatgaccccgaagcagggttatgcagcggaaaagttatatacattcatgtccatttatgtaaaaaatcctgctgaccttgtttatgtcttgtcagtcaccatttgcaaaaccatatttgaccctcaaagaggctgaatttgataagcaacttgctacatactcataataaggagctaaatagaacacgaatgggaaatactcaaatgccaaactaaagaagatattggccaaaataaacgctataccgagagagaaacttgatttttcaacttcctaaaacagtgttgttcaaacatttctacttatttgtacttaccagttgaacctacgtttccctaataaaatgtctatggtaaaaagttaaaaaatcctcctacttttgttagatatatttttttgtgtaattttgtaatcgttatgcggcagtaataatatacatattaatacgagttaggaatcctgtagttctcatatgctacgaggaggtattaaaaggtgcgtttcgacaatgcatctattgtagtatattattgcttaatccaaatgaatattataaatttaggaattcttgctcacattgatgcaggaaaaacttccgtaaccgagaatctgctgtttgccagtggagcaacggaaaagtgcggctgtgtggataatggtgacaccataacggactctatggatatagagaaacgtagaggaattactgttcgggcttctacgacatctattatctggaatggtgtgaaatgcaatatcattgacactccgggacacatggattttattgcggaagtggagcggacattcaaaatgcttgatggagcagtcctcatcttatccgcaaaggaaggcatacaagcgcagacaaagttgctgttcaatactttacagaagctgcaaatcccgacaattatatttatcaataagattgaccgagccggtgtgaatttggagcgtttgtatctggatataaaagcaaatctgtctcaagatgtcctgtttatgcaaaatgttgtcgatggatcggtttatccggtttgctcccaaacatatataaaggaagaatacaaagaatttgtatgcaaccatgacgacaatatattagaacgatatttggcggatagcgaaatttcaccggctgattattggaatacgataatcgctcttgtggcaaaagccaaagtctatccggtgctacatggatcagcaatgttcaatatcggtatcaatgagttgttggacgccatcacttcttttatacttcctccggcatcggtttcaaacagactttcatcttatctttataagatagagcatgaccccaaaggacataaaagaagttttctaaaaataattgacggaagtctgagacttcgagatgttgtaagaatcaacgattcggaaaaattcatcaagattaaaaatctaaaaactatcaatcagggcagagagataaatgttgatgaagtgggcgccaatgatatcgcgattgtagaggatatggatgattttcgaatcggaaattatttaggtgctgaaccttgtttgattcaaggattatcgcatcagcatcccgctctcaaatcctccgtccggccagacaggcccgaagagagaagcaaggtgatatccgctctgaatacattgtggattgaagatccgtctttgtccttttccataaactcatatagtgatgaattggaaatctcgttatatggtttaacccaaaaggaaatcatacagacattgctggaagaacgattttccgtaaaggtccattttgatgagatcaagactatatacaaagaacgacctgtaaaaaaggtcaataagattattcagatcgaagtgccgcccaacccttattgggccacaatagggctgactcttgaacccttaccgttagggacagggttgcaaatcgaaagtgacatctcctatggttatctgaaccattcttttcaaaatgccgtttttgaagggattcgtatgtcttgccaatccgggttacatggatgggaagtgactgatctgaaagtaacttttactcaagccgagtattatagcccggtaagtacaccagctgatttcagacagctgaccccttatgtctttaggctggccttgcaacagtcaggtgtggacattctcgaaccgatgctctattttgagttgcagataccccaagcggcaagttccaaagctattacagatttgcaaaaaatgatgtctgagattgaagatatcagttgcaataatgagtggtgtcatattaaagggaaagttccattaaatacaagtaaagactatgcatcagaagtaagttcatacactaagggcttaggcatttttatggttaagccatgcgggtatcaaataacaaaaggcggttattctgataatatccgcatgaacgaaaaagataaacttttattcatgttccaaaaatcaatgtcatcaaaataaccacgaagtcaaaaaaaaggccatccgtcaggatggccttcgcattaatatgccgcttcgaattcttttaggaagcgtgtatcgttttcagagaacatacggaggtctttcacctgatatttcaggtttgtgatacgctcgatacccataccgagtccataaccgctgtatattttgctgtctataccatttgattcaagtacgttcgggtctaccataccgcaaccgaggatttctacccagccggtgtgtttacagaacggacatcctttaccgccgcagatattacagctgatatccatttccgcacttggttcagcaaacgggaagtaagacggacgcagacggatctttgtatcagcaccgaacatttctttggcaaagagcagcaatacctgcttcaagtcggtgaatgatacgtttttatctacatacagcgcttctacctgatggaagaaacagtgtgcgcgatagctgatagcttcgttacgatatacacgtcccggacagatgatgcggataggaggctgtgaagtttccatcacacgagtctgtacagaagaagtatgtgtacgcaatactacgtccgggtgagcttcgataaagaaagtgtcctgcatatcgcgtgccggatgatcttcggcaaagttcagtgccgagaacacgtgccagtcatcttcaatttccggaccttcggcaatgctgaatcccagacgggcaaagatatcaatgatttcgttctttacaatggtgagcgggtggcgtgtaccgagttctacaggataagccgaacgcgtcaaatccagtccgtcacaatcgttgtcctgactttcaaacatttctttcagcgcgttgattttgtcctgcgcttttgttttcagttcattcagtctcatgccgacttcttttttctgttcggcagctacattacggaaatctgccattaagtcgttaatggctcccttcttacttaggtatttgatgcggagagcttcgagttcttcggcattggaggcgtgtaaggcttccacctctttcagaagttgttcaatcttagctatcattttttaatatttttagcggccccgttaaacaaaattatttgtagaggctgtttcgtcctcacggactcatcagaccggaaagcacatccggtgacagctcaggctactttgtttctttcgacactgcaaatataagaacattatttgaaagttcaagtgaaactttaaattttaacaatagattaaccattgcaaacaaaacaaaaaaaaggtagcccaattgtaaaacgaaaggcccagtctttcgactgagcctttcgttttatcctacgccagtgttacaaccaattaaccaattctgattagaaaaactcatcgagcatcaaatgaaactgcaatttattcatatcaggattatcaataccatatttttgaaaaagccgtttctgtaatgaaggagaaaactcaccgaggcagttccataggatggcaagatcctggtatcggtctgcgattccgactcgtccaacatcaatacaacctattaatttcccctcgtcaaaaataaggttatcaagtgagaaatcaccatgagtgacgactgaatccggtgagaatggcaaaagcttatgcatttctttccagacttgttcaacaggccagccattacgctcgtcatcaaaatcactcgcatcaaccaaaccgttattcattcgtgattgcgcctgagcgaggcgaaatacgcgatcgctgttaaaaggacaattacaaacaggaatcgaatgcaaccggcgcaggaacactgccagcgcatcaacaatattttcacctgaatcaggatattcttctaatacctggaatgctgttttcccggggatcgcagtggtgagtaaccatgcatcatcaggagtacggataaaatgcttgatggtcggaagaggcataaattccgtcagccagtttagtctgaccatctcatctgtaacatcattggcaacgctacctttgccatgtttcagaaacaactctggcgcatcgggcttcccatacaatcgatagattgtcgcacctgattgcccgacattatcgcgagcccatttatacccatataaatcagcatccatgttggaatttaatcgcggcctggagcaagacgtttcccgttgaatatggctcataacaccccttgtattactgtttatgtaagcagacagttttattgttcatgatgatatatttttatcttgtgcaatgtaacatcagagattttgagacacaacgtggctttgttgaataaatcgaacttttgctgagttgaaggatcagccgcgcagttcaacctgttgatagtacgtactaagctctcatgtttcacgtactaagctctcatgtttaacgtactaagctctcatgtttaacgaactaaaccctcatggctaacgtactaagctctcatggctaacgtactaagctctcatgtttcacgtactaagctctcatgtttgaacaataaaattaatataaatcagcaacttaaatagcctctaaggttttaagttttataagaaaaaaaagaatatataaggcttttaaagcttttaaggtttaacggttgtggacaacaagccagggatgtaacgcactgagaagcccttagagcctctcaaagcaattttgagtgacacaggaacacttaacggctgacatggggcggccgctcaatacacgacccctcggttgtattggccgaagatggttattattacatgtatcagacggatgcttcatacggcaacgtccacaccgcaggcggccacttccacggtcgtcgctccaaggaccttgtcaactgggaatacctcggcggtacaatgaagaacctgcccgaatgggtagtgcccaagctcaatgaaatacgaaaagaaatgggacttgccgaaatcaatcctaatgttaatgacttcggctattgggctcccgtagtacgcaaggtaaagaacggcctctatcgcatgtactattccattgtctgccccggcacactcaacggtgccaacacctggtcggagcgcgcctttatcggcctgatggaaaacaacgatccctccaacaacgacggatgggtagacaaaggctacgtcatcaccaatgcttccgacaaaggacttaacttcaacgtgaagccggatgattgggccaattgctattataaatggaatgccatcgacccctcttatgtcatcacgcccgaaggcgagcactggttggtctacggttcatggcatagcggcatagccgctctcaagctcaatagcgaaacaggcaagcctgccgaaactttgggccaaccttgggctacaggccaagcacctgccgagtatggtcagttgatcgccacccgccagacaggtaaccgctggcaagccagtgaaggtcccgaagtcatttaccgcgatggctactactacctcttccttgcctacgacgctctcgacgtgccctataacacccgtgtggtccgctcgaaaagcatcaccggtccctacgtgggcattgacggcaaagacgtgaccgccggtgccgatgcactgcccatagtgactcatccctataagttcagcaaaggctacggctgggtaggcatcgcccactgcgctatcttcgacgatggcaaagacaactggttctacgcctcacaaggccgtctgcctaaggatgttccgggcatcaacgccagcaacgccatcatgatggggcacgtacgcagcatccgctggacgaaagacggttggcctctcgtaatgcctgaacgctacggagccgttcccaaggtagccatcaccgaagaagaattgcccggcaattgggaacacatcgaccttacatacaaatatggagagcagagaacttcagcaacaatgactctcgccgccgaccacactatcaccgaaggtatctggaaaggcagtacgtggagctatgatgccgcccaacagattctgactgtcaacggagtggaactttatctgcaacgcgaaaccgactgggaagccagtccgcgcacccataccatcgtctatgccggctatgccaacaacaagacgtattggggaaagaagtccaaataaacattcccgctccgcacgcaaacttcatatagaaacaccaccactgccccgtaaaacaacaccaaggtttatgaggcagtggtcctgttttgtaggtaggtagagtcaaaaaaaaggccatccgtcaggatggccttctcgagctaatcagctaggatttagtgatgatgatgatgatgacctttatcatcatcgtccttataatctttgtcatcatcatctttgtagtccttatcatcatcgtccttgtaatcagatcctttgtacagttcatccataccatgcgtgatgcccgctgcggttacgaactccagcagaaccatatgatcgcgtttctcgttcggatctttagacagaacgctttgcgtgctcagatagtgattgtctggcagcagaacaggaccatcaccgattggagtgttttgctggtagtgatcagccagctgcacgctgccatcctccacgttgtggcgaattttaaaattcgctttaatgccatttttttgtttatcggcggtgatgtaaacattgtggctgttaaaattgtattccagcttatggcccaggatattgccgtcttctttaaagtcaatgcctttcagctcaatgcggtttaccagggtatcgccttcaaatttcacttccgcacgcgttttgtacgtgccgtcatccttaaaggaaatcgtgcgttcctgcacatagccttccggcatggcggacttgaagaagtcatgctgcttcatatggtccggataacgagcaaagcactgaacaccataagtcagcgtcgttaccagagtcggccaaggaaccggcagtttaccagtagtacagatgaacttcagcgtcagtttaccattagttgcgtcaccttcaccctcgccacgcacggaaaacttatgaccgttgacatcaccatccagttccaccagaatagggacgacaccagtgaacagctcttcgcctttacgcattgaaaataaattattgttaatattacctttgaatctcttttcgagtgctttcataatgttattttttaaatgttgtgtgatcagtcctactttgtttctttcgacactgcaaatataagaacattatttgaaagttcaagtgaaactttaaattttaacaatagattaaccattgcaaacaaaacaaaaaaaaggtagcccaattgtctcaccgcccttacgcctcgattagtaggataaaacgaaaggctcagtcgaaagactgggcctttcgttttgggtcggtcctggtattggaacagctttcgcattgagaaattcaagaaatgaaagcggggaaatggtgaacagaaccatgtatgccgaatcggcaggaattactcaggtgtccctgaatgtgatttataaacttcggattatggaatatgaaatcccgttgacggtgatgacgtattggaatccgaaatccaaccagggatttttctacacaggaatgcagttcaatctgttttgattttttatagagtttggggtgactttttatctcctttatgaggggtaaaaatgtcgaaaaagagggggtataatatcccctctttcttttttgaaaatctcctctattgttttgatggatacttcatactttagcatcgtcgaaaagataaagacagtgacatgtaatactaacatattaatatcaataatatccctggcatcccaagagaataaaatattacaaaatg

SEQ ID NO: 35 - DNA, 10123 bp, Artificial Sequence
  P_por10-lytB biocontainment plasmid
cctggcatctagggcgaaataaatataaaaaaatgaaaaaaataactattgccattgacggttattcatcatgtggaaaaagcacgatggccaaagacttggcacgtgaaataggatacatttatattgatagcggtgccatgtatcgtgctgttacattatatagcctgcagaaagggttctttacggaaagaggcatcgacaccgaagcgttaaaaacagcgatgcccgatatacatatttcattccggttaaatccggagacacaacgccccatgactttcctgaacgatacaaatgtagaggatgccatccgcagcatggaagtttcctctcatgtaagccctatcgccgccttgggttttgtacgtgaggctttggtgaaacaacaacaggaaatgggaaaggccaaaggaattgtcatggacggaagggacattggaaccgttgttttccccgatgccgaactgaaaatatttgtaaccgcctcggctgccatacgtgcacagcgccgttatgatgaattaagaagtaaagggcaagaggcctcttatgaaaaaattctggaaaatgtggaagagcgtgaccgtatagaccaaacccgtgaagtcagcccgttacggcaagcggatgacgctatcttgttggacaacagccacatgagcattgccgaacagaaaaagtggctgaccgaaaaatttcaagcagcgataaatggttaacatagagatagacgaaggatctgggttctgcttcggagtcaccacagctatccgtaaagcagaagaagaactggcaaaaggaaacactctttattgtctgggagacattgtacacaacggacaggaatgtgaacgcctaaaaaaaatggggcttatcacaataaaccacgaagagtttgcccaattacacgatgccaaagtactgttgcgcgcacatggagaacctcctgaaacatacgctatagcccgtaccaacaacatcgagatcattgacgccacctgtccggtagtattacgcctccaaaagcgcatcaaacaggagtatgacaatgttccggcaagtcaagacacacaaatcgtgatttatggcaagaacggtcatgccgaagtactggggctggtaggtcaaactcatggaaaagcaattgtcatagaaacacctgctgaagctgctcatctggacttcaccaaagacatacgcttgtactcccagacaaccaagtctttggaagaattctggcaaatcatagaatatatcaaggagcatatctcacccgatgccacttttgaatattacgacacaatctgccggcaagtggccaaccggatgcctaacatccgcaaatttgcagcagcgcatgatctgatcttttttgtctgcggacgaaaaagctcaaacggaaagatcttatatcaagaatgcaaaaagatcaatccgaattcatacctcattgaccagccggaagaaatagaccggaacttgctcgaggacgtccgttccatcggcatttgtggagcgacttccacccccaaaaacggcgcgcctgataggtgggctgcccttcctggttggcttggtttcatcagccatccgcttgccctcatctgttacgccggcggtagccggccagcctcgcagagcaggattcccgttgagcaccgccaggtgcgaataagggacagtgaagaaggaacacccgctcgcgggtgggcctacttcacctatcctgcccggctgacgccgttggatacaccaaggaaagtctacacgaaccctttggcaaaatcctgtatatcgtgcgaaaaaggatggatataccgaaaaaatcgctataatgaccccgaagcagggttatgcagcggaaaagttatatacattcatgtccatttatgtaaaaaatcctgctgaccttgtttatgtcttgtcagtcaccatttgcaaaaccatatttgaccctcaaagaggctgaatttgataagcaacttgctacatactcataataaggagctaaatagaacacgaatgggaaatactcaaatgccaaactaaagaagatattggccaaaataaacgctataccgagagagaaacttgatttttcaacttcctaaaacagtgttgttcaaacatttctacttatttgtacttaccagttgaacctacgtttccctaataaaatgtctatggtaaaaagttaaaaaatcctcctacttttgttagatatatttttttgtgtaattttgtaatcgttatgcggcagtaataatatacatattaatacgagttaggaatcctgtagttctcatatgctacgaggaggtattaaaaggtgcgtttcgacaatgcatctattgtagtatattattgcttaatccaaatgaatattataaatttaggaattcttgctcacattgatgcaggaaaaacttccgtaaccgagaatctgctgtttgccagtggagcaacggaaaagtgcggctgtgtggataatggtgacaccataacggactctatggatatagagaaacgtagaggaattactgttcgggcttctacgacatctattatctggaatggtgtgaaatgcaatatcattgacactccgggacacatggattttattgcggaagtggagcggacattcaaaatgcttgatggagcagtcctcatcttatccgcaaaggaaggcatacaagcgcagacaaagttgctgttcaatactttacagaagctgcaaatcccgacaattatatttatcaataagattgaccgagccggtgtgaatttggagcgtttgtatctggatataaaagcaaatctgtctcaagatgtcctgtttatgcaaaatgttgtcgatggatcggtttatccggtttgctcccaaacatatataaaggaagaatacaaagaatttgtatgcaaccatgacgacaatatattagaacgatatttggcggatagcgaaatttcaccggctgattattggaatacgataatcgctcttgtggcaaaagccaaagtctatccggtgctacatggatcagcaatgttcaatatcggtatcaatgagttgttggacgccatcacttcttttatacttcctccggcatcggtttcaaacagactttcatcttatctttataagatagagcatgaccccaaaggacataaaagaagttttctaaaaataattgacggaagtctgagacttcgagatgttgtaagaatcaacgattcggaaaaattcatcaagattaaaaatctaaaaactatcaatcagggcagagagataaatgttgatgaagtgggcgccaatgatatcgcgattgtagaggatatggatgattttcgaatcggaaattatttaggtgctgaaccttgtttgattcaaggattatcgcatcagcatcccgctctcaaatcctccgtccggccagacaggcccgaagagagaagcaaggtgatatccgctctgaatacattgtggattgaagatccgtctttgtccttttccataaactcatatagtgatgaattggaaatctcgttatatggtttaacccaaaaggaaatcatacagacattgctggaagaacgattttccgtaaaggtccattttgatgagatcaagactatatacaaagaacgacctgtaaaaaaggtcaataagattattcagatcgaagtgccgcccaacccttattgggccacaatagggctgactcttgaacccttaccgttagggacagggttgcaaatcgaaagtgacatctcctatggttatctgaaccattcttttcaaaatgccgtttttgaagggattcgtatgtcttgccaatccgggttacatggatgggaagtgactgatctgaaagtaacttttactcaagccgagtattatagcccggtaagtacaccagctgatttcagacagctgaccccttatgtctttaggctggccttgcaacagtcaggtgtggacattctcgaaccgatgctctattttgagttgcagataccccaagcggcaagttccaaagctattacagatttgcaaaaaatgatgtctgagattgaagatatcagttgcaataatgagtggtgtcatattaaagggaaagttccattaaatacaagtaaagactatgcatcagaagtaagttcatacactaagggcttaggcatttttatggttaagccatgcgggtatcaaataacaaaaggcggttattctgataatatccgcatgaacgaaaaagataaacttttattcatgttccaaaaatcaatgtcatcaaaataaccacgaagtcaaaaaaaaggccatccgtcaggatggccttcgcattaatatgccgcttcgaattcttttaggaagcgtgtatcgttttcagagaacatacggaggtctttcacctgatatttcaggtttgtgatacgctcgatacccataccgagtccataaccgctgtatattttgctgtctataccatttgattcaagtacgttcgggtctaccataccgcaaccgaggatttctacccagccggtgtgtttacagaacggacatcctttaccgccgcagatattacagctgatatccatttccgcacttggttcagcaaacgggaagtaagacggacgcagacggatctttgtatcagcaccgaacatttctttggcaaagagcagcaatacctgcttcaagtcggtgaatgatacgtttttatctacatacagcgcttctacctgatggaagaaacagtgtgcgcgatagctgatagcttcgttacgatatacacgtcccggacagatgatgcggataggaggctgtgaagtttccatcacacgagtctgtacagaagaagtatgtgtacgcaatactacgtccgggtgagcttcgataaagaaagtgtcctgcatatcgcgtgccggatgatcttcggcaaagttcagtgccgagaacacgtgccagtcatcttcaatttccggaccttcggcaatgctgaatcccagacgggcaaagatatcaatgatttcgttctttacaatggtgagcgggtggcgtgtaccgagttctacaggataagccgaacgcgtcaaatccagtccgtcacaatcgttgtcctgactttcaaacatttctttcagcgcgttgattttgtcctgcgcttttgttttcagttcattcagtctcatgccgacttcttttttctgttcggcagctacattacggaaatctgccattaagtcgttaatggctcccttcttacttaggtatttgatgcggagagcttcgagttcttcggcattggaggcgtgtaaggcttccacctctttcagaagttgttcaatcttagctatcattttttaatatttttagcggccccgttaaacaaaattatttgtagaggctgtttcgtcctcacggactcatcagaccggaaagcacatccggtgacagctcaggctactttgtttctttcgacactgcaaatataagaacattatttgaaagttcaagtgaaactttaaattttaacaatagattaaccattgcaaacaaaacaaaaaaaaggtagcccaattgtaaaacgaaaggcccagtctttcgactgagcctttcgttttatcctacgccagtgttacaaccaattaaccaattctgattagaaaaactcatcgagcatcaaatgaaactgcaatttattcatatcaggattatcaataccatatttttgaaaaagccgtttctgtaatgaaggagaaaactcaccgaggcagttccataggatggcaagatcctggtatcggtctgcgattccgactcgtccaacatcaatacaacctattaatttcccctcgtcaaaaataaggttatcaagtgagaaatcaccatgagtgacgactgaatccggtgagaatggcaaaagcttatgcatttctttccagacttgttcaacaggccagccattacgctcgtcatcaaaatcactcgcatcaaccaaaccgttattcattcgtgattgcgcctgagcgaggcgaaatacgcgatcgctgttaaaaggacaattacaaacaggaatcgaatgcaaccggcgcaggaacactgccagcgcatcaacaatattttcacctgaatcaggatattcttctaatacctggaatgctgttttcccggggatcgcagtggtgagtaaccatgcatcatcaggagtacggataaaatgcttgatggtcggaagaggcataaattccgtcagccagtttagtctgaccatctcatctgtaacatcattggcaacgctacctttgccatgtttcagaaacaactctggcgcatcgggcttcccatacaatcgatagattgtcgcacctgattgcccgacattatcgcgagcccatttatacccatataaatcagcatccatgttggaatttaatcgcggcctggagcaagacgtttcccgttgaatatggctcataacaccccttgtattactgtttatgtaagcagacagttttattgttcatgatgatatatttttatcttgtgcaatgtaacatcagagattttgagacacaacgtggctttgttgaataaatcgaacttttgctgagttgaaggatcagccgcgcagttcaacctgttgatagtacgtactaagctctcatgtttcacgtactaagctctcatgtttaacgtactaagctctcatgtttaacgaactaaaccctcatggctaacgtactaagctctcatggctaacgtactaagctctcatgtttcacgtactaagctctcatgtttgaacaataaaattaatataaatcagcaacttaaatagcctctaaggttttaagttttataagaaaaaaaagaatatataaggcttttaaagcttttaaggtttaacggttgtggacaacaagccagggatgtaacgcactgagaagcccttagagcctctcaaagcaattttgagtgacacaggaacacttaacggctgacatggggcggccgctcaaatcatcctgtaactggaatgccaatcccattttgataccgaaatcgtataatttgcgggcatcatcttccgaagccccccctaatacagcaccaatttttaacgcagcagacaaaagtaccgatgtctttaaacgaatcatctccatatattcgggaacagtaacatcattccgggtttcaaattccatatcccactgctgtccttcacaaatttccaaagcagtctgactgaaaatatccatcacttgcctcaaataacgctccggacaattattcatcagccgataagccaacaccagcatggcatcccccgaaagaatagccgtattctcatcccaaaccttatgcacggtaggcttgtttctgcgcatatccgcacaatccatcaaatcatcatgcaacaatgtataattatgataagtctctatacctgccgcttgtggtaaaatatcatccacattctctttgtaaagctgataggaaagcaacatcaaaacaggacggatacgtttaccgcctaatgacaagacatactctataggagcatacaatccttttggttcgcgcacataaggcatcgtagcaagataagtatttaccttttccaataactggtctgcagaaaaagccataaattattttgattaaggggttctagaaaaagaggctgctttttaaaggcagcctcttaattaagatattaaagtattttattactgtaatttgaaagttacaggcactgtatatttcacacgtacagctttaccacgctgtttgccaggtttccatttcggcatggtcttgattacacggagtgcttccttatccaagtaggggtctacactacgcacaactaccgggtcaacgatagaaccgtccttattaacgacaaactgaacgataaccttaccttgcacaccgttttcctgagaaatagtggggtatttaatattcttacccaagaacttcaaacattcagccatacctccggggaattcaggcatttcctctacaacttggaatatctgctgttcttcaggttcttcttcttccacttctaccggaacatatttaacttccacagcctgacctgtttcttcagaagcctgaatggcagtttcttctactttagcatcgttttcaacgatctgaagcacttcttctaccttaggagcttcgggaggaggaggagcttgtttttgttcctgttccgtaatagggataatttcttcttcaaatacgacatcggttatacctgtttccgtagtcacttgcttgtcgcgatcagtccattcgaaagctacaaacatgagagcaaggataaacacataaccgataagcagccaggtactctttttaccttcgagatctgctttaggcgattttttaacttccataaattgtgttttaaaattaagtgtttctcactgagggcaaatgtaacacaaatcttttaaataaaaagtattttcacatgaaaaatatgctaattcattttagtaggtaggtagagtcaaaaaaaaggccatccgtcaggatggccttctcgagctaatcagctaggatttagtgatgatgatgatgatgacctttatcatcatcgtccttataatctttgtcatcatcatctttgtagtccttatcatcatcgtccttgtaatcagatcctttgtacagttcatccataccatgcgtgatgcccgctgcggttacgaactccagcagaaccatatgatcgcgtttctcgttcggatctttagacagaacgctttgcgtgctcagatagtgattgtctggcagcagaacaggaccatcaccgattggagtgttttgctggtagtgatcagccagctgcacgctgccatcctccacgttgtggcgaattttaaaattcgctttaatgccatttttttgtttatcggcggtgatgtaaacattgtggctgttaaaattgtattccagcttatggcccaggatattgccgtcttctttaaagtcaatgcctttcagctcaatgcggtttaccagggtatcgccttcaaatttcacttccgcacgcgttttgtacgtgccgtcatccttaaaggaaatcgtgcgttcctgcacatagccttccggcatggcggacttgaagaagtcatgctgcttcatatggtccggataacgagcaaagcactgaacaccataagtcagcgtcgttaccagagtcggccaaggaaccggcagtttaccagtagtacagatgaacttcagcgtcagtttaccattagttgcgtcaccttcaccctcgccacgcacggaaaacttatgaccgttgacatcaccatccagttccaccagaatagggacgacaccagtgaacagctcttcgcctttacgcattgaaaataaattattgttaatattacctttgaatctcttttcgagtgctttcataatgttattttttaaatgttgtgtgatcagtcctactttgtttctttcgacactgcaaatataagaacattatttgaaagttcaagtgaaactttaaattttaacaatagattaaccattgcaaacaaaacaaaaaaaaggtagcccaattgtctcaccgcccttacgcctcgattagtaggataaaacgaaaggctcagtcgaaagactgggcctttcgttttgggtcggtcctggtattggaacagctttcgcattgagaaattcaagaaatgaaagcggggaaatggtgaacagaaccatgtatgccgaatcggcaggaattactcaggtgtccctgaatgtgatttataaacttcggattatggaatatgaaatcccgttgacggtgatgacgtattggaatccgaaatccaaccagggatttttctacacaggaatgcagttcaatctgttttgattttttatagagtttggggtgactttttatctcctttatgaggggtaaaaatgtcgaaaaagagggggtataatatcccctctttcttttttgaaaatctcctctattgttttgatggatacttcatactttagcatcgtcgaaaagataaagacagtgacatgtaatactaacatattaatatcaataatatc

SEQ ID NO: 36 - DNA, 10123 bp, Artificial Sequence
  P_por10-RF-2 biocontainment plasmid
cctggcatcaattctcgaaaaaatataataaaatgataacaatagagcaactgaaagacgtaaaagaacgtactgcggcacttgaaagatatctggacatagaaaataaactggttcaggtggaagaagaacaactgcgtacgcaggcgcccggtttttgggatgatgccaagaaagcagaagcacaaatgaggaaggtgaaagatctgcaaaaatggatcgacggttaccgtgaggtaaagacgatggcagatgaactggaattggcttttgacttttgtaaagatgatttggttaccgaagaagaagtggatgcagcgtatcaaaaggctgtcactgcggtggaggcattggaactgaagaatatgcttcgccaggaggccgaccaaatggattgtgtattgaaaattaattgcggtgccggtggtactgaaagtcaggattgggcttccatgctgatgcgtatgtatatgcgttgggcggaaaccaatggctataaagtgagcgtggctaaccttcaggatggggatgaggccggaatcaagacggtgactatgaatattgagggcagttttgcatatggttatctgaaaggtgagaatggagtccaccgcttggtgcgcgtgtctccttataatgctcaggggaaacggatgacttcttttgcttctgtgtttgtaacgccgttggtggatgatagtattgaagtgacaattgaacctgcccgtatgtcttgggatactttccgttcgggaggggccggcggacagaatgtgaacaaggtggaatcaggagtacgtctgcgttatcaatataaagatccgtataccggtgaggaagaggaaatcttgattgagaatactgaaacccgtgaccagccgaagaataaggaaaatgcgatgagacagttgcgttcaattttatatgataaggaattgcagcaccgcatggaagaacaggccaaggtggaggcaggcaagaagaagattgaatggggatcacagatacgcagttatgtctttgatgaccgtcgtgtgaaggatcatcgtactaattttcaaacttcggatgtgaacggagtgatggatggaaagattgatggctttatcaaggcatacttgatggagttttccggttcggagaattagtaaattcttcgtaatttatttgttttcttctagaaactttgtacttttgggatattcaaaagagatggtttaatcttaaaaatgaaatacttatgggaaagaataagaaagctgcttatagtaagcgggaagaagagaaagcaaataggattgtaaaaggtctgttcatcggattaattgtattagcccttgttattatggtgggctatgccatgtatggataaaaacggaaaataaatagtgaagtcctgctgaggttattctctgcggggcttttttatatattaaaacgctatgggacaagaaatagaacgaaaatttttagtaaaggacgacagttataaactagaggcttatgcacatagtcatattgtgcaaggttatatcaaacggcgcgcctgataggtgggctgcccttcctggttggcttggtttcatcagccatccgcttgccctcatctgttacgccggcggtagccggccagcctcgcagagcaggattcccgttgagcaccgccaggtgcgaataagggacagtgaagaaggaacacccgctcgcgggtgggcctacttcacctatcctgcccggctgacgccgttggatacaccaaggaaagtctacacgaaccctttggcaaaatcctgtatatcgtgcgaaaaaggatggatataccgaaaaaatcgctataatgaccccgaagcagggttatgcagcggaaaagttatatacattcatgtccatttatgtaaaaaatcctgctgaccttgtttatgtcttgtcagtcaccatttgcaaaaccatatttgaccctcaaagaggctgaatttgataagcaacttgctacatactcataataaggagctaaatagaacacgaatgggaaatactcaaatgccaaactaaagaagatattggccaaaataaacgctataccgagagagaaacttgatttttcaacttcctaaaacagtgttgttcaaacatttctacttatttgtacttaccagttgaacctacgtttccctaataaaatgtctatggtaaaaagttaaaaaatcctcctacttttgttagatatatttttttgtgtaattttgtaatcgttatgcggcagtaataatatacatattaatacgagttaggaatcctgtagttctcatatgctacgaggaggtattaaaaggtgcgtttcgacaatgcatctattgtagtatattattgcttaatccaaatgaatattataaatttaggaattcttgctcacattgatgcaggaaaaacttccgtaaccgagaatctgctgtttgccagtggagcaacggaaaagtgcggctgtgtggataatggtgacaccataacggactctatggatatagagaaacgtagaggaattactgttcgggcttctacgacatctattatctggaatggtgtgaaatgcaatatcattgacactccgggacacatggattttattgcggaagtggagcggacattcaaaatgcttgatggagcagtcctcatcttatccgcaaaggaaggcatacaagcgcagacaaagttgctgttcaatactttacagaagctgcaaatcccgacaattatatttatcaataagattgaccgagccggtgtgaatttggagcgtttgtatctggatataaaagcaaatctgtctcaagatgtcctgtttatgcaaaatgttgtcgatggatcggtttatccggtttgctcccaaacatatataaaggaagaatacaaagaatttgtatgcaaccatgacgacaatatattagaacgatatttggcggatagcgaaatttcaccggctgattattggaatacgataatcgctcttgtggcaaaagccaaagtctatccggtgctacatggatcagcaatgttcaatatcggtatcaatgagttgttggacgccatcacttcttttatacttcctccggcatcggtttcaaacagactttcatcttatctttataagatagagcatgaccccaaaggacataaaagaagttttctaaaaataattgacggaagtctgagacttcgagatgttgtaagaatcaacgattcggaaaaattcatcaagattaaaaatctaaaaactatcaatcagggcagagagataaatgttgatgaagtgggcgccaatgatatcgcgattgtagaggatatggatgattttcgaatcggaaattatttaggtgctgaaccttgtttgattcaaggattatcgcatcagcatcccgctctcaaatcctccgtccggccagacaggcccgaagagagaagcaaggtgatatccgctctgaatacattgtggattgaagatccgtctttgtccttttccataaactcatatagtgatgaattggaaatctcgttatatggtttaacccaaaaggaaatcatacagacattgctggaagaacgattttccgtaaaggtccattttgatgagatcaagactatatacaaagaacgacctgtaaaaaaggtcaataagattattcagatcgaagtgccgcccaacccttattgggccacaatagggctgactcttgaacccttaccgttagggacagggttgcaaatcgaaagtgacatctcctatggttatctgaaccattcttttcaaaatgccgtttttgaagggattcgtatgtcttgccaatccgggttacatggatgggaagtgactgatctgaaagtaacttttactcaagccgagtattatagcccggtaagtacaccagctgatttcagacagctgaccccttatgtctttaggctggccttgcaacagtcaggtgtggacattctcgaaccgatgctctattttgagttgcagataccccaagcggcaagttccaaagctattacagatttgcaaaaaatgatgtctgagattgaagatatcagttgcaataatgagtggtgtcatattaaagggaaagttccattaaatacaagtaaagactatgcatcagaagtaagttcatacactaagggcttaggcatttttatggttaagccatgcgggtatcaaataacaaaaggcggttattctgataatatccgcatgaacgaaaaagataaacttttattcatgttccaaaaatcaatgtcatcaaaataaccacgaagtcaaaaaaaaggccatccgtcaggatggccttcgcattaatatgccgcttcgaattcttttaggaagcgtgtatcgttttcagagaacatacggaggtctttcacctgatatttcaggtttgtgatacgctcgatacccataccgagtccataaccgctgtatattttgctgtctataccatttgattcaagtacgttcgggtctaccataccgcaaccgaggatttctacccagccggtgtgtttacagaacggacatcctttaccgccgcagatattacagctgatatccatttccgcacttggttcagcaaacgggaagtaagacggacgcagacggatctttgtatcagcaccgaacatttctttggcaaagagcagcaatacctgcttcaagtcggtgaatgatacgtttttatctacatacagcgcttctacctgatggaagaaacagtgtgcgcgatagctgatagcttcgttacgatatacacgtcccggacagatgatgcggataggaggctgtgaagtttccatcacacgagtctgtacagaagaagtatgtgtacgcaatactacgtccgggtgagcttcgataaagaaagtgtcctgcatatcgcgtgccggatgatcttcggcaaagttcagtgccgagaacacgtgccagtcatcttcaatttccggaccttcggcaatgctgaatcccagacgggcaaagatatcaatgatttcgttctttacaatggtgagcgggtggcgtgtaccgagttctacaggataagccgaacgcgtcaaatccagtccgtcacaatcgttgtcctgactttcaaacatttctttcagcgcgttgattttgtcctgcgcttttgttttcagttcattcagtctcatgccgacttcttttttctgttcggcagctacattacggaaatctgccattaagtcgttaatggctcccttcttacttaggtatttgatgcggagagcttcgagttcttcggcattggaggcgtgtaaggcttccacctctttcagaagttgttcaatcttagctatcattttttaatatttttagcggccccgttaaacaaaattatttgtagaggctgtttcgtcctcacggactcatcagaccggaaagcacatccggtgacagctcaggctactttgtttctttcgacactgcaaatataagaacattatttgaaagttcaagtgaaactttaaattttaacaatagattaaccattgcaaacaaaacaaaaaaaaggtagcccaattgtaaaacgaaaggcccagtctttcgactgagcctttcgttttatcctacgccagtgttacaaccaattaaccaattctgattagaaaaactcatcgagcatcaaatgaaactgcaatttattcatatcaggattatcaataccatatttttgaaaaagccgtttctgtaatgaaggagaaaactcaccgaggcagttccataggatggcaagatcctggtatcggtctgcgattccgactcgtccaacatcaatacaacctattaatttcccctcgtcaaaaataaggttatcaagtgagaaatcaccatgagtgacgactgaatccggtgagaatggcaaaagcttatgcatttctttccagacttgttcaacaggccagccattacgctcgtcatcaaaatcactcgcatcaaccaaaccgttattcattcgtgattgcgcctgagcgaggcgaaatacgcgatcgctgttaaaaggacaattacaaacaggaatcgaatgcaaccggcgcaggaacactgccagcgcatcaacaatattttcacctgaatcaggatattcttctaatacctggaatgctgttttcccggggatcgcagtggtgagtaaccatgcatcatcaggagtacggataaaatgcttgatggtcggaagaggcataaattccgtcagccagtttagtctgaccatctcatctgtaacatcattggcaacgctacctttgccatgtttcagaaacaactctggcgcatcgggcttcccatacaatcgatagattgtcgcacctgattgcccgacattatcgcgagcccatttatacccatataaatcagcatccatgttggaatttaatcgcggcctggagcaagacgtttcccgttgaatatggctcataacaccccttgtattactgtttatgtaagcagacagttttattgttcatgatgatatatttttatcttgtgcaatgtaacatcagagattttgagacacaacgtggctttgttgaataaatcgaacttttgctgagttgaaggatcagccgcgcagttcaacctgttgatagtacgtactaagctctcatgtttcacgtactaagctctcatgtttaacgtactaagctctcatgtttaacgaactaaaccctcatggctaacgtactaagctctcatggctaacgtactaagctctcatgtttcacgtactaagctctcatgtttgaacaataaaattaatataaatcagcaacttaaatagcctctaaggttttaagttttataagaaaaaaaagaatatataaggcttttaaagcttttaaggtttaacggttgtggacaacaagccagggatgtaacgcactgagaagcccttagagcctctcaaagcaattttgagtgacacaggaacacttaacggctgacatggggcggccgctcaattccggtttcttggaaccagtttgccgcaactgtaaaaacagtttcgaatgcattgatagaattaggtataggcatacaggaaaatatagcagttttttctcaaaataaaccggaatgtctgtatgtggactttggagcttttggggtacgggctgttactgtaccattttatgctaccagttccgaggcgcaggtacattatatggtaggtgatgccgaaatacgttatatctttgtaggtgaacagttgcaatatgatgtggcgttccgggttatgcaactgggaagccaactgaaacagattataattttcgacaaggaggtaaaacgtgatgagcgggaccagacttccatttattttgatgactttctgaaattgggcgaggcgcatccgcatcaagctgaggtagacaagcgtacttcagagtcgggtaatggtgatcttgccaatattctttataccagtggaacaaccggagacagcaagggggtgatgttgcatcattcttgctatgaggcggccattccggcacacgatgaacgtttccctcaattgggtgatcaggatgtgattatgaatttccttccttttactcatgtgtttgagcgtgcatggacttgctggtgtctttcgatggggtgtactttgtctatcaacttgcgtcctgctgatatccagaagacaataaaggagatccgtcctacggctatgtgcagtgttccccgtttctgggagaaagtgtatgccggcgtgcaagaaaaaatcaatgagacaaccggattgaaaaagaagttgatgctggatgctattaaagtgggacgtgaacataatttggaatatgtgtacaaagggctgactcctccgcctgtattgcacatgaaatataaattttatgagaaaacgatctatagcttgttgaaaaagactattggcattgaaaacgggcgtttcttccctactgccggtgcggctattccgccggctgtacaggagtttgttttgtcggtgggaattaatatggtagcgggttatggattgacggaatctactgcaacggttgcttgtgagaatgataatgaccatgtggttggttcggtggggcgtatcatgcctcatgtgcaggtcagaataggggagaataacgaaataatgctacgtggtgagggaatcactcatggctattataaaaaggaagctgctacgaaagcagcgtttactgaagacggatggttccataccggtgatgcgggttatataaaagatgggcatttgttccttacagagcgtatcaaggacttgtttaaaacttcaaacgggaagtatatcgctcctcaagccattgaagccaaattggtggtagaccgttatatcgatcagatttctattattgccgatgaacgtaaatttgtttctgctttgataattcctgaatataaactggtgaaagagtatgccgcaaaaaaaggtattcgctatgaaagtatggaggaactgttgcgtaggtaggtagagtcaaaaaaaaggccatccgtcaggatggccttctcgagctaatcagctaggatttagtgatgatgatgatgatgacctttatcatcatcgtccttataatctttgtcatcatcatctttgtagtccttatcatcatcgtccttgtaatcagatcctttgtacagttcatccataccatgcgtgatgcccgctgcggttacgaactccagcagaaccatatgatcgcgtttctcgttcggatctttagacagaacgctttgcgtgctcagatagtgattgtctggcagcagaacaggaccatcaccgattggagtgttttgctggtagtgatcagccagctgcacgctgccatcctccacgttgtggcgaattttaaaattcgctttaatgccatttttttgtttatcggcggtgatgtaaacattgtggctgttaaaattgtattccagcttatggcccaggatattgccgtcttctttaaagtcaatgcctttcagctcaatgcggtttaccagggtatcgccttcaaatttcacttccgcacgcgttttgtacgtgccgtcatccttaaaggaaatcgtgcgttcctgcacatagccttccggcatggcggacttgaagaagtcatgctgcttcatatggtccggataacgagcaaagcactgaacaccataagtcagcgtcgttaccagagtcggccaaggaaccggcagtttaccagtagtacagatgaacttcagcgtcagtttaccattagttgcgtcaccttcaccctcgccacgcacggaaaacttatgaccgttgacatcaccatccagttccaccagaatagggacgacaccagtgaacagctcttcgcctttacgcattgaaaataaattattgttaatattacctttgaatctcttttcgagtgctttcataatgttattttttaaatgttgtgtgatcagtcctactttgtttctttcgacactgcaaatataagaacattatttgaaagttcaagtgaaactttaaattttaacaatagattaaccattgcaaacaaaacaaaaaaaaggtagcccaattgtctcaccgcccttacgcctcgattagtaggataaaacgaaaggctcagtcgaaagactgggcctttcgttttgggtcggtcctggtattggaacagctttcgcattgagaaattcaagaaatgaaagcggggaaatggtgaacagaaccatgtatgccgaatcggcaggaattactcaggtgtccctgaatgtgatttataaacttcggattatggaatatgaaatcccgttgacggtgatgacgtattggaatccgaaatccaaccagggatttttctacacaggaatgcagttcaatctgttttgattttttatagagtttggggtgactttttatctcctttatgaggggtaaaaatgtcgaaaaagagggggtataatatcccctctttcttttttgaaaatctcctctattgttttgatggatacttcatactttagcatcgtcgaaaagataaagacagtgacatgtaatactaacatattaatatcaataatatc

SEQ ID NO: 37 - DNA, 11841 bp, Artificial Sequence
  P_tet-argS biocontainment plasmid
aatatagaagaaaaactcaccacgtccattatcagcgctatcaaaacgttgtacggacaggatgtacccggaaaaatggtacaactgcaaaagactaagaaagagtttgaaggacatcttactttggttgttttcccttttctgaaaatgtctaagaaggggcctgaacagaccgcacaggaaataggcggatacctgaaagagcatgctcccgaattggtttcagcctacaatgcagtgaagggctttcttaatttgacaattgcttcggattgttggattgaacttttgaattctattcaggctgctcccgaatacggtattgaaaaggctacggaaaactctccgttggtgatgattgagtattcttctcccaatacaaacaagccgcttcatctggggcacgtccgtaataacctgttgggaaatgccttggcaaatgtcatggcggcaaatggcaataaggtggtcaagaccaatattgtgaatgaccgtggtatccatatctgtaagtccatgctggcctggttgaaatatggtaacggtgaaacacctgaatcatcgggtaagaagggggaccatttgattggtgactattatgtagcttttgacaagcattacaaggctgaggtaaaggaactgacagctcagtaccaggctgaaggcttgaatgaagaagaagctaaggctaaggcagaggcaaactctcctctgatgctggaagctcgcgagatgctccgtaagtgggaggcgaatgaccctgagatccgtgccttgtggaagaagatgaatgactgggtatatgccggattcgatgaaacgtataagatgatgggagttagtttcgataaaatttattatgaatcgaatacctatctggaaggtaaggagaaagtgatggaaggactggaaaaaggtttcttctaccggaaagaggataactctgtatgggctgatttgactgccgaaggactggaccataagttgcttcttcgcggtgacggtacttctgtttatatgacccaggatatcggtactgccaaattacgttttcaggattaccccatcaacaagatgatttatgtagtgggtaatgaacaaaactatcatttccaggtactttctatcttgctcgacaaattgggttttgaatggggcaaaggattggttcatttctcatacggtatggtagagctgcccgagggcaaaatgaaaagtcgtgaaggtacagtagtggatgcggatgatttgatggaagcaatgattgaaactgctaaggaaacttctgctgaattaggtaaattggacggtctgacccaagaagaagccgacaatattgcccgtattgttggtttgggtgctttgaaatattttatcctgaaggtggacgcacgtaagaatatgactttcaacccgaaagaatcgatagatttcaatggcaatacaggacctttcattcagtatacgtatgcccgtatccagtctgtattacgcaaaaaacggcgcgcctgataggtgggctgcccttcctggttggcttggtttcatcagccatccgcttgccctcatctgttacgccggcggtagccggccagcctcgcagagcaggattcccgttgagcaccgccaggtgcgaataagggacagtgaagaaggaacacccgctcgcgggtgggcctacttcacctatcctgcccggctgacgccgttggatacaccaaggaaagtctacacgaaccctttggcaaaatcctgtatatcgtgcgaaaaaggatggatataccgaaaaaatcgctataatgaccccgaagcagggttatgcagcggaaaagttatatacattcatgtccatttatgtaaaaaatcctgctgaccttgtttatgtcttgtcagtcaccatttgcaaaaccatatttgaccctcaaagaggctgaatttgataagcaacttgctacatactcataataaggagctaaatagaacacgaatgggaaatactcaaatgccaaactaaagaagatattggccaaaataaacgctataccgagagagaaacttgatttttcaacttcctaaaacagtgttgttcaaacatttctacttatttgtacttaccagttgaacctacgtttccctaataaaatgtctatggtaaaaagttaaaaaatcctcctacttttgttagatatatttttttgtgtaattttgtaatcgttatgcggcagtaataatatacatattaatacgagttaggaatcctgtagttctcatatgctacgaggaggtattaaaaggtgcgtttcgacaatgcatctattgtagtatattattgcttaatccaaatgaatattataaatttaggaattcttgctcacattgatgcaggaaaaacttccgtaaccgagaatctgctgtttgccagtggagcaacggaaaagtgcggctgtgtggataatggtgacaccataacggactctatggatatagagaaacgtagaggaattactgttcgggcttctacgacatctattatctggaatggtgtgaaatgcaatatcattgacactccgggacacatggattttattgcggaagtggagcggacattcaaaatgcttgatggagcagtcctcatcttatccgcaaaggaaggcatacaagcgcagacaaagttgctgttcaatactttacagaagctgcaaatcccgacaattatatttatcaataagattgaccgagccggtgtgaatttggagcgtttgtatctggatataaaagcaaatctgtctcaagatgtcctgtttatgcaaaatgttgtcgatggatcggtttatccggtttgctcccaaacatatataaaggaagaatacaaagaatttgtatgcaaccatgacgacaatatattagaacgatatttggcggatagcgaaatttcaccggctgattattggaatacgataatcgctcttgtggcaaaagccaaagtctatccggtgctacatggatcagcaatgttcaatatcggtatcaatgagttgttggacgccatcacttcttttatacttcctccggcatcggtttcaaacagactttcatcttatctttataagatagagcatgaccccaaaggacataaaagaagttttctaaaaataattgacggaagtctgagacttcgagatgttgtaagaatcaacgattcggaaaaattcatcaagattaaaaatctaaaaactatcaatcagggcagagagataaatgttgatgaagtgggcgccaatgatatcgcgattgtagaggatatggatgattttcgaatcggaaattatttaggtgctgaaccttgtttgattcaaggattatcgcatcagcatcccgctctcaaatcctccgtccggccagacaggcccgaagagagaagcaaggtgatatccgctctgaatacattgtggattgaagatccgtctttgtccttttccataaactcatatagtgatgaattggaaatctcgttatatggtttaacccaaaaggaaatcatacagacattgctggaagaacgattttccgtaaaggtccattttgatgagatcaagactatatacaaagaacgacctgtaaaaaaggtcaataagattattcagatcgaagtgccgcccaacccttattgggccacaatagggctgactcttgaacccttaccgttagggacagggttgcaaatcgaaagtgacatctcctatggttatctgaaccattcttttcaaaatgccgtttttgaagggattcgtatgtcttgccaatccgggttacatggatgggaagtgactgatctgaaagtaacttttactcaagccgagtattatagcccggtaagtacaccagctgatttcagacagctgaccccttatgtctttaggctggccttgcaacagtcaggtgtggacattctcgaaccgatgctctattttgagttgcagataccccaagcggcaagttccaaagctattacagatttgcaaaaaatgatgtctgagattgaagatatcagttgcaataatgagtggtgtcatattaaagggaaagttccattaaatacaagtaaagactatgcatcagaagtaagttcatacactaagggcttaggcatttttatggttaagccatgcgggtatcaaataacaaaaggcggttattctgataatatccgcatgaacgaaaaagataaacttttattcatgttccaaaaatcaatgtcatcaaaataaccacgaagtcaaaaaaaaggccatccgtcaggatggccttcgcattaatatgccgcttcgaattcttttaggaagcgtgtatcgttttcagagaacatacggaggtctttcacctgatatttcaggtttgtgatacgctcgatacccataccgagtccataaccgctgtatattttgctgtctataccatttgattcaagtacgttcgggtctaccataccgcaaccgaggatttctacccagccggtgtgtttacagaacggacatcctttaccgccgcagatattacagctgatatccatttccgcacttggttcagcaaacgggaagtaagacggacgcagacggatctttgtatcagcaccgaacatttctttggcaaagagcagcaatacctgcttcaagtcggtgaatgatacgtttttatctacatacagcgcttctacctgatggaagaaacagtgtgcgcgatagctgatagcttcgttacgatatacacgtcccggacagatgatgcggataggaggctgtgaagtttccatcacacgagtctgtacagaagaagtatgtgtacgcaatactacgtccgggtgagcttcgataaagaaagtgtcctgcatatcgcgtgccggatgatcttcggcaaagttcagtgccgagaacacgtgccagtcatcttcaatttccggaccttcggcaatgctgaatcccagacgggcaaagatatcaatgatttcgttctttacaatggtgagcgggtggcgtgtaccgagttctacaggataagccgaacgcgtcaaatccagtccgtcacaatcgttgtcctgactttcaaacatttctttcagcgcgttgattttgtcctgcgcttttgttttcagttcattcagtctcatgccgacttcttttttctgttcggcagctacattacggaaatctgccattaagtcgttaatggctcccttcttacttaggtatttgatgcggagagcttcgagttcttcggcattggaggcgtgtaaggcttccacctctttcagaagttgttcaatcttagctatcattttttaatatttttagcggccccgttaaacaaaattatttgtagaggctgtttcgtcctcacggactcatcagaccggaaagcacatccggtgacagctcaggctactttgtttctttcgacactgcaaatataagaacattatttgaaagttcaagtgaaactttaaattttaacaatagattaaccattgcaaacaaaacaaaaaaaaggtagcccaattgtaaaacgaaaggcccagtctttcgactgagcctttcgttttatcctacagtcgctcggcgatcgaaggcttcggaaaaaaaaggccatccgtcaggatggccttcgcattaatatgccgcttcgaattcttttaggaagcgtgtatcgttttcagagaacatacggaggtctttcacctgatatttcaggtttgtgatacgctcgatacccataccgagtccataaccgctgtatattttgctgtctataccatttgattcaagtacgttcgggtctaccataccgcaaccgaggatttctacccagccggtgtgtttacagaacggacatcctttaccgccgcagatattacagctgatatccatttccgcacttggttcagcaaacgggaagtaagacggacgcagacggatctttgtatcagcaccgaacatttctttggcaaagagcagcaatacctgcttcaagtcggtgaatgatacgtttttatctacatacagcgcttctacctgatggaagaaacagtgtgcgcgatagctgatagcttcgttacgatatacacgtcccggacagatgatgcggataggaggctgtgaagtttccatcacacgagtctgtacagaagaagtatgtgtacgcaatactacgtccgggtgagcttcgataaagaaagtgtcctgcatatcgcgtgccggatgatcttcggcaaagttcagtgccgagaacacgtgccagtcatcttcaatttccggaccttcggcaatgctgaatcccagacgggcaaagatatcaatgatttcgttctttacaatggtgagcgggtggcgtgtaccgagttctacaggataagccgaacgcgtcaaatccagtccgtcacaatcgttgtcctgactttcaaacatttctttcagcgcgttgattttgtcctgcgcttttgttttcagttcattcagtctcatgccgacttcttttttctgttcggcagctacattacggaaatctgccattaagtcgttaatggctcccttcttacttaggtatttgatgcggagagcttcgagttcttcggcattggaggcgtgtaaggcttccacctctttcagaagttgttcaatcttagctatcattttttaatatttttagcggccccgttaaacaaaattatttgtagaggctgtttcgtcctcacggactcatcagaccggaaagcacatccggtgacagctcaggctactttgtttctttcgacactgcaaatataagaacattatttgaaagttcaagtgaaactttaaattttaacaatagattaaccattgcaaacaaaacaaaaaaaaggtagcccaattgtaaaacgaaaggcccagtctttcgactgagcctttcgttttatcctacgccagtgttacaaccaattaaccaattctgattagaaaaactcatcgagcatcaaatgaaactgcaatttattcatatcaggattatcaataccatatttttgaaaaagccgtttctgtaatgaaggagaaaactcaccgaggcagttccataggatggcaagatcctggtatcggtctgcgattccgactcgtccaacatcaatacaacctattaatttcccctcgtcaaaaataaggttatcaagtgagaaatcaccatgagtgacgactgaatccggtgagaatggcaaaagcttatgcatttctttccagacttgttcaacaggccagccattacgctcgtcatcaaaatcactcgcatcaaccaaaccgttattcattcgtgattgcgcctgagcgaggcgaaatacgcgatcgctgttaaaaggacaattacaaacaggaatcgaatgcaaccggcgcaggaacactgccagcgcatcaacaatattttcacctgaatcaggatattcttctaatacctggaatgctgttttcccggggatcgcagtggtgagtaaccatgcatcatcaggagtacggataaaatgcttgatggtcggaagaggcataaattccgtcagccagtttagtctgaccatctcatctgtaacatcattggcaacgctacctttgccatgtttcagaaacaactctggcgcatcgggcttcccatacaatcgatagattgtcgcacctgattgcccgacattatcgcgagcccatttatacccatataaatcagcatccatgttggaatttaatcgcggcctggagcaagacgtttcccgttgaatatggctcataacaccccttgtattactgtttatgtaagcagacagttttattgttcatgatgatatatttttatcttgtgcaatgtaacatcagagattttgagacacaacgtggctttgttgaataaatcgaacttttgctgagttgaaggatcagccgcgcagttcaacctgttgatagtacgtactaagctctcatgtttcacgtactaagctctcatgtttaacgtactaagctctcatgtttaacgaactaaaccctcatggctaacgtactaagctctcatggctaacgtactaagctctcatgtttcacgtactaagctctcatgtttgaacaataaaattaatataaatcagcaacttaaatagcctctaaggttttaagttttataagaaaaaaaagaatatataaggcttttaaagcttttaaggtttaacggttgtggacaacaagccagggatgtaacgcactgagaagcccttagagcctctcaaagcaattttgagtgacacaggaacacttaacggctgacatggggcggccgctcaaaccaccacttacgcgtacatttaaatctgtatagtgcgcatcttgtgaaagggcgtcgtcccagctgtcgtcccataatggtttggcgcctgctaccagttttccgtcatggccgattggttcaggataagcactgccataaggattgatgcctagattgcctgtaacattgcttgatgcccatacagcagcttcttcggcagagtaaccgttgtccatacgatagttacgcatggcttcccaatataattcataatattggtttgtattcaactggtcgtagtctgcccgtgcacggcttgaaaaaccatatttggcagataattcaacggtgggtgcgctatctttatttccttgtttggtggtgatcataattacgccgtttgctgcacgtgagccatataatgcagcggaagctgcatctttcaatacagtgattgacgcaatatctgaagatgctatggaggaaagagcaccatcgtaaggaacaccatcaaccacatagaggggattggttgaagcgtttacagaaccaactccacgaatcaggatcgtggcgtctgatccaggctgaccgctggaggaaaaagactgtaagccagctacagttccttgcagtgcttttgatacactactgacctgtgctttttcaatagtaccggcggcaatatagcttgcagaccctgtaaatgtggattttttggcagtaccgtaaggaacggttatcactacctcatctaccatttgggttgtttccttcaattctacgttaatcactttgcgtctgtttaccggtatggttactgtttcgtaacctacaaaagagaagatcaggctttcattgccgttaacctgaatctgatagctgccatcgatggaagtgatggtaccgcgagtttgtccttttacagctactgtgacaccaggcatttcttcgcctcctgcggtgactttaccagttactgtaatttcctgtgcatatgtaatcatgcagaatagcaagctacataataatgaagaaaatctgctcatataaacttggcttttattgggggtttgtacattgccatttttcaggcattatatattgaactctctttctaaaattgtgatgctaccttttttatcattatcatatttcctaatagtggttttatggccatccaaacctcattagggactctttttgcttgtgtattttataattgtgatattcaataacaatcgcaaatatatgtattttgatttaaataggataatatattttaatatttttttatggtgaacctgttgaaagtcaaaactatacggaattttattaacgtagttaaaataggaattgtcttatttaaatattgggcggatagatcaaatctatttgtttatcgcattcctgtgtattgatttgtttaatttgatttcaacagtaaatctacttggtagaaaaaaaaggccatccgtcaggatggccttctaatcagctaggaaccttacgccccgccctgccactcatcgcagtactgttgtaattcattaagcattctgccgacatggaagccatcacaaacggcatgatgaacctgaatcgccagcggcatcagcaccttgtcgccttgcgtataatatttgcccatggtgaaaacgggggcgaagaagttgtccatattggccacgtttaaatcaaaactggtgaaactcacccagggattggctgaaacgaaaaacatattctcaataaaccctttagggaaataggccaggttttcaccgtaacacgccacatcttgcgaatatatgtgtagaaactgccggaaatcgtcgtggtattcactccagagcgatgaaaacgtttcagtttgctcatggaaaacggtgtaacaagggtgaacactatcccatatcaccagctcaccgtctttcattgccatacgaaattccggatgagcattcatcaggcgggcaagaatgtgaataaaggccggataaaacttgtgcttatttttctttacggtctttaaaaaggccgtaatatccagctgaacggtctggttataggtacattgagcaactgactgaaatgcctcaaaatgttctttacgatgccattgggatatatcaacggtggtatatccagtgatttttttctccattgaaaataaattattgttaatattacctttgaatctcttttcgagtgctttcataatgttattttttaaatgttgtgtgatccaggctactttgtttctttcgacactgcaaatataagaacattatttgaaagttcaagtgaaactttaaattttaacaatagattaaccattgcaaacaaaacaaaaaaaaggtagcccaattgtaaaacgaaaggcccagtctttcgactgagcctttcgttttatcattgtctcaccgcccttacgcctcgattagtttttgttatcaataaaaaaggccccccgatttgggaggccttttttcgaaaattattaagacccactttcacatttaagttgtttttctaatccgcatatgatcaattcaaggccgaataagaaggctggctctgcaccttggtgatcaaataattcgatagcttgtcgtaataatggcggcatactatcagtagtaggtgtttccctttcttctttagcgacttgatgctcttgatcttccaatacgcaacctaaagtaaaatgccccacagcgctgagtgcatataatgcattctctagtgaaaaaccttgttggcataaaaaggctaattgattttcgagagtttcatactgtttttctgtaggccgtgtacctaaatgtacttttgctccatcgcgatgacttagtaaagcacatctaaaacttttagcgttattacgtaaaaaatcttgccagctttccccttctaaagggcaaaagtgagtatggtgcctatctaacatctcaatggctaaggcgtcgagcaaagcccgcttattttttacatgccaatacaatgtaggctgctctacacctagcttctgggcgagtttacgggttgttaaaccttcgattccgacctcattaagcagctctaatgcgctgttaatcactttacttttatctaatctagacatattcgtttaatatcataaataatttattttattttaaaatgcgcgggtgcaaaggtaagaggttttattttaactaccaaatgttttcggaagttttttcgcttttctttttctatcgtttctcagactctcttagcgaaagggaaagaaggtaaagaagaaaaacaaaacgccttttcttttttgcacccgctttccaagagaagaaagccttgttaaattgacttagtgtaaaagcgcagtactgcttgaccataagaacaaaaaaatctctatcactgatagggataaagtttggaagataaagctaaaagttcttatctttgcagtctccctatcagtgatagagatcctggcatcgtgtaactttaaaattttataaaatg

SEQ ID NO: 38 - protein, 1349 aa, Bacteroides nordii
MNKIRIPLLFICNILFLNVYCQTLAKNYYVTSAQNLSQNNVKTIIQDGKGFMWFGTKNGLNRFDGKKVRIYNCYDEKRGIGNNNISALFEDKNKNIWVGTDRGIYIYNPLSEKFSHFNITTETGVSISDWVAQIAEDKEQRIWIIIPNQGVFRFDIDTNSLSHYPFIIASNQASKHPQCITILKSGEIWIGTNKDGLYHYNTKTDKFEQHIVDRNGISIKNDMIYSTCEYGDYIILGVHEGELKKYDYNNNTFLVVNAADVHHKIIRDVKVFNNELWVGTEQGIYIIDEDAGKTELIRSDPMIGNSLTDNKIYAMYQDNENGIWIGTVFGGVNYIPSQTLTIDRYLPSQQKNSIDGRIIRDLKEDQNGKIWVCTEDNGISVFDPKKQSFERITPTGGTQFIPQAIIENQDEIWVGLFKNGIDIYNLKTKTRKHLSPEQLGIDESSIWALYQDRKGTIWLGNGWGVYSSDKNNLKFERHNEFGYNFIFDIYEDSKGNIWVCTMGNGVFKLRATDKIVEHYIYRQEDPNTISSNSVSSVTEDRKGNLWFSTDRGGICKYMKETNSFKSYSKNEGLPDDVAYKIIEDNEGLLWFGTNHGMVRFNPETEAIQVFTEKDGINNNQFNYKSGIRTRSGKLYFGSINGLMAVDPNNIKRPHVTAPLYITKLLIFNEELKVNEKGSPLTNSIIYTNEVHLNHDQNSIGFEFASLSYSSSSNYKYSYKLENFDKDWTITNDNRSVSYTNLSPGNYSFRVRATNSLGEWGDNETSIKIFIKAPWWQSTIATYCYILLFLIGVITFIYLYDRTQKKRYAQKQILADNQREKDIYNAKIEFFTDIAHEIRTPLILINGPLEAILEENEIDPPAIRKNMRIMEQNVKRLLDLINQLLDFRKIDERKFILNPTNTNLNNLVTKTINRFQLTFEQKEKQLTLHITDDVLIANIDQESVIKIISNLINNALKYSNKTIQVDLYATDDNIAHIRVINDGAPIPDNLSKKIFEPFYRTTKVSNIPGSGIGLSLASNLAKLNNAELILDTTASLTTFILSIPISINADEQHTEEKEQEEDSESTTFIEQNTPPTVISDTEEYEELGEDEPKIKENSILIVEDEPEVRSYLSERLEKYFNVYIATNGVEALKVLNEKYINIILSDLMMPEMDGLELCQNVKSNEDLAQIPFVLLTAKTDMDSKMKSLEIGADAYIEKPTAFNYLYKHINMLLKNREKEKKAFLNKPFFPVQKMKVSKNDEKFLNKIIEIINHDLANPELNVKYLADNLYMSRSGLHRKVKQITSLSPIEFIKLIRLKKAAELIQEGEYQIAEVCFMVGINSPSYFGKMFFQQFGMTPKEFAKSNKVGKG

SEQ ID NO: 39 - protein, 1326 aa, Artificial Sequence
  HTCS-17150
MFRLILSLISVLIIVCKSFASNEFVTRKYTTLDGLSQNDVQCIYQDSKGFIWLATNDGLNRFDGYEFKVYGYQSNGLNSNLIVCIDEDSHGNLWIGTADRGVFLFNSVKNEFVSLNLGHSGIDKNFTCDKILVDSKDRVWFHSSDESIYLVNYDFQNGKINTVLRSTLKLPYISDIIEIDNTIMLSSEDGLYECNVDGDELLLNKLLGCPIASAIVISSSQILYSNLENHQLCLYDKHTCKVSTLLENCDIRKMVYKNKRLFYATTSTVNVLTFDVLHAIESKPQVIATYSYSYPQTVVLDKNDILWIGFFKSGFMSIRENNKPIDLFRGIGNDHISSVYTFAKSDIYLGTEGSGLYHFNSITGNARLIPFTANRIVYSTAYSNYTDCMYVSLMYDGIYSFTSDNDYKKISGLRNVRAMLADGKYLWIGTYNKGLFRYDLSTGVMKEIKTSDNKELKIVRNIIKDHKGNIWVASSFGLKVLESADLYIDNPVLNSVKGLDELDYIVPVCEDLNHNIWYGTLGRGLRKIVDLDENHNACVENFSSADGLSSNTIKSIVNGTDGTLWISTNKGINSLNINTQRIRSYDIFDGLQDYEFMELSAGVMTDGTMIFGGVNGINVFRPNDFDVIDFNGSPTLVDFKIFNHSVEADSTYSAYFDKSVSFTEHIELPYNLNTFSFQFSSLDYRSPYKVGYEYMLEGVDDSWISTSAFHREAFYTKLPSGEYMFRLRVRNSDGVYSLNELSIPVIINPPFWQSTIATYCYILLFLIGVITFIYLYDRTQKKRYAQKQILADNQREKDIYNAKIEFFTDIAHEIRTPLILINGPLEAILEENEIDPPAIRKNMRIMEQNVKRLLDLINQLLDFRKIDERKFILNPTNTNLNNLVTKTINRFQLTFEQKEKQLTLHITDDVLIANIDQESVIKIISNLINNALKYSNKTIQVDLYATDDNIAHIRVINDGAPIPDNLSKKIFEPFYRTTKVSNIPGSGIGLSLASNLAKLNNAELILDTTASLTTFILSIPISINADEQHTEEKEQEEDSESTTFIEQNTPPTVISDTEEYEELGEDEPKIKENSILIVEDEPEVRSYLSERLEKYFNVYIATNGVEALKVLNEKYINIILSDLMMPEMDGLELCQNVKSNEDLAQIPFVLLTAKTDMDSKMKSLEIGADAYIEKPTAFNYLYKHINMLLKNREKEKKAFLNKPFFPVQKMKVSKNDEKFLNKIIEIINHDLANPELNVKYLADNLYMSRSGLHRKVKQITSLSPIEFIKLIRLKKAAELIQEGEYQIAEVCFMVGINSPSYFGKMFFQQFGMTPKEFAKSNKVGKG

SEQ ID NO: 40 - DNA, 9041 bp, Artificial Sequence
  pWW1267
gtctttttaagaacaatcccaatacagtctgttactgtaatttctttcgggcatcgtatctattattgagtgtaatggtacgatgctttttttgttttatactatgaaatgaagttaaagatttatttttttcttgattgattttgatacgcattctaaagtggaaaatatctataattatctattaactactgtaaatacttgatgttttagataaaatcaataactttgtaatcttgatgaaatataaagaataatagttaaatgtttagattaatcttaagtttaatatcagttctgattatagtttgcaaatcctttgcatccaatgagtttgtcacaagaaagtacactactcttgatggactttcccaaaatgatgtgcaatgtatttatcaagactcaaaaggctttatatggttggccacgaacgacggactgaacaggtttgacggatatgaatttaaggtttacggatatcagtcaaacggtcttaacagtaatctgatagtatgtattgacgaagattcacatggaaatctgtggataggtacagccgatagaggagtgttcctgttcaattctgtaaagaacgaattcgtttcattaaatcttggtcacagcggtattgataaaaatttcacttgcgataagattcttgtcgactctaaagacagagtctggtttcattcctctgatgaaagtatataccttgtaaattatgattttcaaaatggcaaaataaatactgtcttaagatcaacattaaaattaccatacatttccgacatcatagaaatagataatacgataatgctctcctccgaagatggcctgtacgaatgtaacgtcgatggagatgaattactgcttaacaaactattgggatgccctatagcttcagccatagtcatctcatcttctcaaatattgtactcaaatctggaaaatcatcaattatgtttatacgacaagcatacctgcaaggtaagtaccctgttggaaaactgtgatatacgaaaaatggtatataaaaacaaaagattattttatgccactacaagcactgtgaatgtgttgacttttgatgtattgcatgccatcgagtcaaaaccacaggttattgctacatattcttacagctatccgcaaactgtagttcttgataaaaacgatattctttggataggatttttcaagagtggctttatgagtatacgcgaaaataataaacctatagatttattcagaggaataggaaatgatcatatatcgtccgtttatacatttgccaaatctgatatatatttaggcacagaaggctcagggctatatcattttaattccattaccggtaatgccagacttattcctttcacggcaaacaggatagtatactcaacagcatactcaaactacaccgactgcatgtatgtgtctctgatgtacgatggtatttacagtttcacttctgataatgattataaaaagatctcaggtttgagaaatgtgcgcgcaatgcttgccgatggaaaatatttgtggattggcacatataataaaggtcttttcagatatgatttgtccacaggtgtgatgaaggaaatcaaaacatctgacaataaagaacttaagatagtaagaaacatcattaaagatcataagggtaatatatgggtagcttccagcttcggtcttaaagtattggaatctgcagatttgtatatagataatcctgttttgaactcagtcaagggacttgatgaactcgactatatagtgcctgtatgtgaagatttgaatcataatatctggtatggaacacttggacgtgggttaaggaaaatcgtggatttggatgaaaaccataatgcctgcgttgaaaattttagctctgcagacgggttgagcagcaatacaataaaatcaattgttaatggcacggatggaacattatggatttctaccaataaaggaattaattcgttgaatatcaacacacagagaataagatcttatgatattttcgatggacttcaggattatgaatttatggaactttctgctggagtaatgacggatggaacaatgatattcggtggcgtaaacggaattaacgtctttagacctaatgactttgatgtgatagatttcaacggtagtcctacactcgttgattttaaaatcttcaatcacagcgttgaggcagattccacatattcagcttatttcgacaaaagtgtaagttttacagagcacattgaattgccttataatttaaacactttctcattccagttcagctccctggattacagaagtccttataaggttggttacgaatatatgctcgaaggcgtagatgattcatggatttccacctccgcttttcatcgtgaggctttctacacaaagcttccttcaggcgaatatatgttcagactgagggtcaggaatagcgatggagtctacagtttgaatgaactttccatacctgtcattattaaccctcctttctggcagtctacaattgccacctactgctatattctgttatttctgattggcgtcatcacattcatttatctgtatgaccgtactcaaaaaaaacgctacgctcaaaaacagattttagcggacaatcagcgcgagaaagacatttataacgcaaagattgagtttttcactgatattgcccacgaaatccgcaccccactcattctgattaacggaccgctggaagctattttagaagagaacgaaattgatccgccggcgattcgtaagaacatgcgcatcatggaacagaacgttaagcgcctgctggatctgatcaatcagctgctcgatttcaggaaaatcgatgaacgcaagttcattttaaatccaacaaacaccaatctgaataatcttgtcacaaagactattaaccgttttcaattgacatttgagcagaaagagaaacaactcacactgcatatcaccgatgatgtcttgattgcgaacatcgatcaagaatctgttatcaaaatcatttcaaatctgattaataacgcacttaaatattctaacaaaaccattcaggttgatctctacgccacagacgataatatcgcccacatccgtgtgatcaatgatggggccccgatccctgataacctgtcgaaaaagatttttgaaccgttctatcgtacaaccaaagttagcaacatcccgggttctggtattggtctttcacttgcgtcgaacctggcgaagttgaataacgccgaacttattctggacacgacggcgagcctcactacattcatactgagcattccgatttcgattaacgcggatgaacagcataccgaagaaaaggaacaggaggaagattctgagagcacaaccttcattgagcagaataccccgcccaccgttatttctgacactgaagagtatgaagaactcggtgaggatgaaccgaaaatcaaggaaaacagcatactgatcgtggaagatgaaccagaggtccgcagctacttgtctgagcgccttgaaaaatacttcaatgtttacattgcgacaaatggtgtggaggcccttaaggtgctgaacgaaaagtacatcaacattatcctgtctgatttaatgatgcctgaaatggatggcctggaactgtgccagaacgtcaaatccaacgaggacctcgcgcagatcccgtttgttctgctaactgctaaaaccgatatggactctaagatgaaatcactggagatcggcgcggatgcgtacatcgaaaaaccgactgcttttaactacttatacaaacatatcaatatgctgttgaagaaccgcgaaaaggagaaaaaagcctttctgaataaaccgtttttccccgtccaaaaaatgaaagtgtcgaaaaatgatgagaaattcttgaacaaaatcatcgagattattaaccatgatctcgcaaaccccgagctcaatgtgaaatatctggcggacaatctgtatatgtcccgctcaggtctgcatcgtaaagtcaagcagattacaagtctctctccgatcgagtttataaagctgattcgtctgaagaaggcagcagagctcatccaggaaggcgaataccagattgctgaagtctgcttcatggttggcatcaactcaccaagctactttggtaaaatgtttttccagcagtttggtatgaccccgaaagaatttgcgaaatccaataaagttggtaaagggtaatgcgaaggccatcctgacggatggccttttttttgacttgagaccggctattacgagcgcttaaacggcgcgcctgataggtgggctgcccttcctggttggcttggtttcatcagccatccgcttgccctcatctgttacgccggcggtagccggccagcctcgcagagcaggattcccgttgagcaccgccaggtgcgaataagggacagtgaagaaggaacacccgctcgcgggtgggcctacttcacctatcctgcccggctgacgccgttggatacaccaaggaaagtctacacgaaccctttggcaaaatcctgtatatcgtgcgaaaaaggatggatataccgaaaaaatcgctataatgaccccgaagcagggttatgcagcggaaaagcgggattaaaagtcggggattggtgaacaaaaaggtgtttctctctttaagagaaatatcgttttgctaaacagttgatattgaggtatcattttatcgtaaaagacatttttgctcaacaattgcttgacggaaatcaacaaattttagcattttgtaaaaaagtcgctatataatttggtgaattggagttattttcatatttttgcatcccgaagagtttctcttaaagagagaaacatcttttgcataccttttccgaccgaatttttatgtcgtaaagaggggctttgcagggggtggactcagaaagatgagaatagatgactattgtagttgaaacacatagaaagttgctgatatacagaccgatacgcatatcgggatgaaccatgagtacgttcttttctcaaaaaacataaatattcgaaaagagatgcaataaattaaggagaggttataatgaacaaagtaaatataaaagatagtcaaaattttattacttcaaaatatcacatagaaaaaataatgaattgcataagtttagatgaaaaagataacatctttgaaataggtgcagggaaaggtcattttactgctggattggtaaagagatgtaattttgtaacggcgatagaaattgattctaaattatgtgaggtaactcgtaataagctcttaaattatcctaactatcaaatagtaaatgatgatatactgaaatttacatttcctagccacaatccatataaaatatttggcagcataccttacaacataagcacaaatataattcgaaaaattgtttttgaaagttcagccacaataagttatttaatagtggaatatggttttgctaaaatgttattagatacaaacagatcactagcattgctgttaatggcagaggtagatatttctatattagcaaaaattcctaggtattatttccatccaaaacctaaagtggatagcacattaattgtattaaaaagaaagccagcaaaaatggcatttaaagagagaaaaaaatatgaaacttttgtaatgaaatgggttaacaaagagtacgaaaaactgtttacaaaaaatcaatttaataaagctttaaaacatgcgagaatatatgatataaacaatattagtttcgaacaatttgtatcgctatttaatagttataaaatatttaacggctaaaaacaataggccacatgcaactgtaaatgtttacgcgggtaccgacaccgcggtggaggggaattacgagtcattggtaactatctatgaaactgtttgatacttttatagttgattaaacttgttcatggcatttgccttaatatcatccgctatgtcaatgtagggtttcatagctttgtagtcgctgtgtcccgtccatttcatgaccacctgtgccgggattccgagagccagcgcattgcagatgaatgtcctttttcctgcatgggtactgagcaaagcgtatttgggtgtgacttcatcaatacgttcatttcccttgtagtaggtttcccgtacaggctcgttgatttctgccagttcgcccagctctttcaggtaatcgttcatcttctggttgctgatgacgggcagagccatgtaattctcgaaatggatgtccttgtatttgtccagtatggctttgctgtatttgttcagttcaatcgtcaggctgtcggcagtcttgactgtggttatttcgatgtggtcggacttcacatcgcttcttttcagattgcgaacatccgaataccgcaaactcgtaaagcagcagaacaggaaaacatcacgcacacgttccaggtattgcttatccttgggtatctggtagtctttcagcttgttcagttcatcccaagtcaggaagattacttttttcgaggtggttttcagtttcggtttgaacgtatcgtatgcaatgttctgatgatgtcctttcttgaagctccagcgcaggaaccatttgaggaatcccatttgcttgccgatggtgctgtttctcatatccttggtgtcacgcaggaagttgacgtattcgttcaatccaaactcgttgaaatagttgaacgttgcatcctccttgaactctttgaggtggttcctcactgctgcaaatttttcataggtggatgccgtccagttattctggttaccgcactcttttacaaactcatcgaacacctcccaaaagctgacaggggcttcttccggctgttcttcactggtatctttcattctcatgttgaaagcttccttcaactgttgggtcgttggcatgacctcctgcacctcaaattccttgaaaatattctggatttcggcatagtatttcagcaagtccgtattgatttcggctgcactttgctttagcttgttggtacatccgttctttacccgctgcttatctgcatcccatttggctacgtcaatccggtagcccgttgtaaactcgatacgttggctggcaaagatgacacgcatacggatgggtacgttctctacgattggcacaccgttctttttccggctctccaatgcaaaaatgatgttgcgcttgatattcataattgggtgcgtttgaaattctacacccaaatatacacccaattattgagatagcaaaagacatttagaaacatttacttttactctatattgtaatttacacttgattatcagtcgtttgcagtcttatgatattctgtgaaagtataagttcgagagcctgtctctccgcaaaaaacgctgaaaatcagcagattgcaaaacaaacaccctgttttacacccaagaatgtaaagtcgggtgtttttgttttatttaagataatacaaccactacataataaaagagtagcgatattaaaagaatccgatgagaaaagactaatatttatctatccattcagtttgatttctcaggactttacatcgtcctgaaagtatttgttgccagtgttacaaccaattaaccaattctgattagaaaaactcatcgagcatcaaatgaaactgcaatttattcatatcaggattatcaataccatatttttgaaaaagccgtttctgtaatgaaggagaaaactcaccgaggcagttccataggatggcaagatcctggtatcggtctgcgattccgactcgtccaacatcaatacaacctattaatttcccctcgtcaaaaataaggttatcaagtgagaaatcaccatgagtgacgactgaatccggtgagaatggcaaaagcttatgcatttctttccagacttgttcaacaggccagccattacgctcgtcatcaaaatcactcgcatcaaccaaaccgttattcattcgtgattgcgcctgagcgaggcgaaatacgcgatcgctgttaaaaggacaattacaaacaggaatcgaatgcaaccggcgcaggaacactgccagcgcatcaacaatattttcacctgaatcaggatattcttctaatacctggaatgctgttttcccggggatcgcagtggtgagtaaccatgcatcatcaggagtacggataaaatgcttgatggtcggaagaggcataaattccgtcagccagtttagtctgaccatctcatctgtaacatcattggcaacgctacctttgccatgtttcagaaacaactctggcgcatcgggcttcccatacaatcgatagattgtcgcacctgattgcccgacattatcgcgagcccatttatacccatataaatcagcatccatgttggaatttaatcgcggcctggagcaagacgtttcccgttgaatatggctcataacaccccttgtattactgtttatgtaagcagacagttttattgttcatgatgatatatttttatcttgtgcaatgtaacatcagagattttgagacacaacgtggctttgttgaataaatcgaacttttgctgagttgaaggatcagccgcgcagttcaacctgttgatagtacgtactaagctctcatgtttcacgtactaagctctcatgtttaacgtactaagctctcatgtttaacgaactaaaccctcatggctaacgtactaagctctcatggctaacgtactaagctctcatgtttcacgtactaagctctcatgtttgaacaataaaattaatataaatcagcaacttaaatagcctctaaggttttaagttttataagaaaaaaaagaatatataaggcttttaaagcttttaaggtttaacggttgtggacaacaagccagggatgtaacgcactgagaagcccttagagcctctcaaagcaattttgagtgacacaggaacacttaacggctgacatggggcggccgctcaacgtaccggtctcagtagggagagctgtatgtgggtag

SEQ ID NO: 41 - DNA, 6734 bp, Artificial Sequence
  HTCS-17150 reporter construct
gtagaaaatggactacaaaccactcaaacgccgaaaatttctacatttattatagttatcgatacatttaacgacagccttaataaaccattacgctacatttgtgcattcagtttttaaacctgagctgtcaccggatgtgctttccggtctgatgagtccgtgaggacgaaacagcctctacaaataattttgtttaatccatcaatttaaaatttaaaataatggtttttactctggaagattttgttggcgattggcgtcagaccgcgggttataatttggatcaagtcctggaacagggtggcgtaagctctctgttccagaacctgggtgtgagcgtgacgccgattcagcgcatcgttctgtccggcgagaacggtctgaaaattgatattcatgtgatcatcccgtacgaaggcctgagcggtgaccaaatgggtcaaatcgagaaaatctttaaagtcgtctacccagttgacgatcaccacttcaaggttatcttgcattacggtacgctggtgattgatggtgtgaccccgaatatgattgactatttcggccgtccgtatgaaggcattgccgtttttgacggtaaaaagatcaccgtcaccggtaccctgtggaatggcaataagattattgacgagcgtctgattaacccggacggcagcctgctgttccgcgtgaccatcaacggtgtcacgggttggcgtctgtgcgagcgcatcctggcataaggttcctagctgattagaaggccatcctgacggatggccttttttttgactgctatgacttgagaccggctattacgagcgcttaaacggcgcgcctgataggtgggctgcccttcctggttggcttggtttcatcagccatccgcttgccctcatctgttacgccggcggtagccggccagcctcgcagagcaggattcccgttgagcaccgccaggtgcgaataagggacagtgaagaaggaacacccgctcgcgggtgggcctacttcacctatcctgcccggctgacgccgttggatacaccaaggaaagtctacacgaaccctttggcaaaatcctgtatatcgtgcgaaaaaggatggatataccgaaaaaatcgctataatgaccccgaagcagggttatgcagcggaaaagttatatacattcatgtccatttatgtaaaaaatcctgctgaccttgtttatgtcttgtcagtcaccatttgcaaaaccatatttgaccctcaaagaggctgaatttgataagcaacttgctacatactcataataaggagctaaatagaacacgaatgggaaatactcaaatgccaaactaaagaagatattggccaaaataaacgctataccgagagagaaacttgatttttcaacttcctaaaacagtgttgttcaaacatttctacttatttgtacttaccagttgaacctacgtttccctaataaaatgtctatggtaaaaagttaaaaaatcctcctacttttgttagatatatttttttgtgtaattttgtaatcgttatgcggcagtaataatatacatattaatacgagttaggaatcctgtagttctcatatgctacgaggaggtattaaaaggtgcgtttcgacaatgcatctattgtagtatattattgcttaatccaaatgaatattataaatttaggaattcttgctcacattgatgcaggaaaaacttccgtaaccgagaatctgctgtttgccagtggagcaacggaaaagtgcggctgtgtggataatggtgacaccataacggactctatggatatagagaaacgtagaggaattactgttcgggcttctacgacatctattatctggaatggtgtgaaatgcaatatcattgacactccgggacacatggattttattgcggaagtggagcggacattcaaaatgcttgatggagcagtcctcatcttatccgcaaaggaaggcatacaagcgcagacaaagttgctgttcaatactttacagaagctgcaaatcccgacaattatatttatcaataagattgaccgagccggtgtgaatttggagcgtttgtatctggatataaaagcaaatctgtctcaagatgtcctgtttatgcaaaatgttgtcgatggatcggtttatccggtttgctcccaaacatatataaaggaagaatacaaagaatttgtatgcaaccatgacgacaatatattagaacgatatttggcggatagcgaaatttcaccggctgattattggaatacgataatcgctcttgtggcaaaagccaaagtctatccggtgctacatggatcagcaatgttcaatatcggtatcaatgagttgttggacgccatcacttcttttatacttcctccggcatcggtttcaaacagactttcatcttatctttataagatagagcatgaccccaaaggacataaaagaagttttctaaaaataattgacggaagtctgagacttcgagatgttgtaagaatcaacgattcggaaaaattcatcaagattaaaaatctaaaaactatcaatcagggcagagagataaatgttgatgaagtgggcgccaatgatatcgcgattgtagaggatatggatgattttcgaatcggaaattatttaggtgctgaaccttgtttgattcaaggattatcgcatcagcatcccgctctcaaatcctccgtccggccagacaggcccgaagagagaagcaaggtgatatccgctctgaatacattgtggattgaagatccgtctttgtccttttccataaactcatatagtgatgaattggaaatctcgttatatggtttaacccaaaaggaaatcatacagacattgctggaagaacgattttccgtaaaggtccattttgatgagatcaagactatatacaaagaacgacctgtaaaaaaggtcaataagattattcagatcgaagtgccgcccaacccttattgggccacaatagggctgactcttgaacccttaccgttagggacagggttgcaaatcgaaagtgacatctcctatggttatctgaaccattcttttcaaaatgccgtttttgaagggattcgtatgtcttgccaatccgggttacatggatgggaagtgactgatctgaaagtaacttttactcaagccgagtattatagcccggtaagtacaccagctgatttcagacagctgaccccttatgtctttaggctggccttgcaacagtcaggtgtggacattctcgaaccgatgctctattttgagttgcagataccccaagcggcaagttccaaagctattacagatttgcaaaaaatgatgtctgagattgaagatatcagttgcaataatgagtggtgtcatattaaagggaaagttccattaaatacaagtaaagactatgcatcagaagtaagttcatacactaagggcttaggcatttttatggttaagccatgcgggtatcaaataacaaaaggcggttattctgataatatccgcatgaacgaaaaagataaacttttattcatgttccaaaaatcaatgtcatcaaaataaccacgagtcattggtaactatctatgaaactgtttgatacttttatagttgattaaacttgttcatggcatttgccttaatatcatccgctatgtcaatgtagggtttcatagctttgtagtcgctgtgtcccgtccatttcatgaccacctgtgccgggattccgagagccagcgcattgcagatgaatgtcctttttcctgcatgggtactgagcaaagcgtatttgggtgtgacttcatcaatacgttcatttcccttgtagtaggtttcccgtacaggctcgttgatttctgccagttcgcccagctctttcaggtaatcgttcatcttctggttgctgatgacgggcagagccatgtaattctcgaaatggatgtccttgtatttgtccagtatggctttgctgtatttgttcagttcaatcgtcaggctgtcggcagtcttgactgtggttatttcgatgtggtcggacttcacatcgcttcttttcagattgcgaacatccgaataccgcaaactcgtaaagcagcagaacaggaaaacatcacgcacacgttccaggtattgcttatccttgggtatctggtagtctttcagcttgttcagttcatcccaagtcaggaagattacttttttcgaggtggttttcagtttcggtttgaacgtatcgtatgcaatgttctgatgatgtcctttcttgaagctccagcgcaggaaccatttgaggaatcccatttgcttgccgatggtgctgtttctcatatccttggtgtcacgcaggaagttgacgtattcgttcaatccaaactcgttgaaatagttgaacgttgcatcctccttgaactctttgaggtggttcctcactgctgcaaatttttcataggtggatgccgtccagttattctggttaccgcactcttttacaaactcatcgaacacctcccaaaagctgacaggggcttcttccggctgttcttcactggtatctttcattctcatgttgaaagcttccttcaactgttgggtcgttggcatgacctcctgcacctcaaattccttgaaaatattctggatttcggcatagtatttcagcaagtccgtattgatttcggctgcactttgctttagcttgttggtacatccgttctttacccgctgcttatctgcatcccatttggctacgtcaatccggtagcccgttgtaaactcgatacgttggctggcaaagatgacacgcatacggatgggtacgttctctacgattggcacaccgttctttttccggctctccaatgcaaaaatgatgttgcgcttgatattcataattgggtgcgtttgaaattctacacccaaatatacacccaattattgagatagcaaaagacatttagaaacatttacttttactctatattgtaatttacacttgattatcagtcgtttgcagtcttatgatattctgtgaaagtataagttcgagagcctgtctctccgcaaaaaacgctgaaaatcagcagattgcaaaacaaacaccctgttttacacccaagaatgtaaagtcgggtgtttttgttttatttaagataatacaaccactacataataaaagagtagcgatattaaaagaatccgatgagaaaagactaatatttatctatccattcagtttgatttctcaggactttacatcgtcctgaaagtatttgttgccagtgttacaaccaattaaccaattctgattagaaaaactcatcgagcatcaaatgaaactgcaatttattcatatcaggattatcaataccatatttttgaaaaagccgtttctgtaatgaaggagaaaactcaccgaggcagttccataggatggcaagatcctggtatcggtctgcgattccgactcgtccaacatcaatacaacctattaatttcccctcgtcaaaaataaggttatcaagtgagaaatcaccatgagtgacgactgaatccggtgagaatggcaaaagcttatgcatttctttccagacttgttcaacaggccagccattacgctcgtcatcaaaatcactcgcatcaaccaaaccgttattcattcgtgattgcgcctgagcgaggcgaaatacgcgatcgctgttaaaaggacaattacaaacaggaatcgaatgcaaccggcgcaggaacactgccagcgcatcaacaatattttcacctgaatcaggatattcttctaatacctggaatgctgttttcccggggatcgcagtggtgagtaaccatgcatcatcaggagtacggataaaatgcttgatggtcggaagaggcataaattccgtcagccagtttagtctgaccatctcatctgtaacatcattggcaacgctacctttgccatgtttcagaaacaactctggcgcatcgggcttcccatacaatcgatagattgtcgcacctgattgcccgacattatcgcgagcccatttatacccatataaatcagcatccatgttggaatttaatcgcggcctggagcaagacgtttcccgttgaatatggctcataacaccccttgtattactgtttatgtaagcagacagttttattgttcatgatgatatatttttatcttgtgcaatgtaacatcagagattttgagacacaacgtggctttgttgaataaatcgaacttttgctgagttgaaggatcagccgcgcagttcaacctgttgatagtacgtactaagctctcatgtttcacgtactaagctctcatgtttaacgtactaagctctcatgtttaacgaactaaaccctcatggctaacgtactaagctctcatggctaacgtactaagctctcatgtttcacgtactaagctctcatgtttgaacaataaaattaatataaatcagcaacttaaatagcctctaaggttttaagttttataagaaaaaaaagaatatataaggcttttaaagcttttaaggtttaacggttgtggacaacaagccagggatgtaacgcactgagaagcccttagagcctctcaaagcaattttgagtgacacaggaacacttaacggctgacatggggcggccgctcaacgtaccggtctcagtagggagagctgtatgtgggtag

SEQ ID NO: 42 - protein, 1336 aa, Bacteroides ovatus
MMTAISMFSSNENILSLCNINNVNISNGLSHNGVTATMRDSRGYLWICTYDGLNQYNGFTVKIYKNTLSENLFNSNRIRCIAEDEYGRLWLGTDEGITVFDYDKYKFYRLSVNNKNEFKSNFNFIIRRIMFDKHRKIMICLSESNSILEYDMNLSLVTNISYPKRLEANDLCAIDANNYLLSSNIGIFCYNTTNKELYKINNDKIKDSSCLRVSRNNNIYISSGSILYDCSHVVDNGILSEIKIHNTFNIGSAIKTFELEDNERIWIGTVNDGVMVYPSDGNSEYQMKLLDYKRISEISFLDNSYCISTFDGGIHFYSFKNEIFKKVDFKGFKFYQVAAYGDGLLAKNNKSLYLYDFRQNKISEFVSVISKELQNNVKSFYVDSLDRLWILTKENRLYSYDKNAKLKEYKDVKLLLLKDDSPQIFYSDPMGNIWLGYIDNLYRISFTSDHEIDEVESIHLDSCGISKIRAMYWDSRTSSMFVGTDVQGMYQLYIDRQKPIKDIKIEHYMFDKGDEHSLSSNFVSSIIRDKSGILWFGTEQGGLCRAIEEDGQRMKFISYSEEDGLSNNVVKSLLCDKSGNLWIATNIGLNIYRNDSGSFHVYRTSDGLPFDDFWYASFMLNDGTLVFSKFEGFCYFNPDLLPKKEDLPQLHIRSFNVLSDKILPNEKYNDRIIIDSRLSDNDVLNLKYNENSISFDIDALYSKVATDHFIRYKLEPLNDEWIQIPAKDQKLSFNGLKPDNYRLSLSASNSFDEWTKPISIGINIAPPFSRSAIAYVIYVLLAILFISIIVYNLMRVQRLKYELREEAIQKKSLELLNIEKQRFFSNISHELKTPLTLILAPITVLSERFSLDIDVKEKLAIIKRQAKKMLNLIELSHELQLNERNMLKVKPCMFSFNKFLKDITEDFMFMAKYDNKDFVVNYPNKNVNVYADYSMIEQMLNNLLTNSFKHTVQRDKVGIDISYHDQLLTIKVYDTGDGISEKDLPYIFDRFYQASNQGLKNIGGTGIGLAFTKRLIELHSGNIGVESKLGEGSTFTVNLPIIQNVTEADVIDETNEQEGETDLYVGDWDIKSIEIDSKYLRFLVYLVEDNTEMRSFLTEIIGQFFTLKSFANGKECLDGMNKEWPDIIVSDVMMPEMDGNELCNVIKSDLKTSHIPVILLTACNTVDDKIKGLQSGADAYIPKPFYPKHVLTRICTLLDNRAKLWERFQSGVPLNIAANENEVSAKDNEFICALYAKFNEYVDDECVDMELLAKEIGVNRSLFFQKVKALTNDSPFELLKNYRLQRAAELLVKEEYNVKEVCMMTGFKSRTHFSRLFKEKYGVAPSKYKESVVNRI

SEQ ID NO: 43 - protein, 1319 aa, Artificial Sequence
  chimeric HTCS
MFRLILSLISVLIIVCKSFASNEFVTRKYTTLDGLSQNDVQCIYQDSKGFIWLATNDGLNRFDGYEFKVYGYQSNGLNSNLIVCIDEDSHGNLWIGTADRGVFLFNSVKNEFVSLNLGHSGIDKNFTCDKILVDSKDRVWFHSSDESIYLVNYDFQNGKINTVLRSTLKLPYISDIIEIDNTIMLSSEDGLYECNVDGDELLLNKLLGCPIASAIVISSSQILYSNLENHQLCLYDKHTCKVSTLLENCDIRKMVYKNKRLFYATTSTVNVLTFDVLHAIESKPQVIATYSYSYPQTVVLDKNDILWIGFFKSGFMSIRENNKPIDLFRGIGNDHISSVYTFAKSDIYLGTEGSGLYHFNSITGNARLIPFTANRIVYSTAYSNYTDCMYVSLMYDGIYSFTSDNDYKKISGLRNVRAMLADGKYLWIGTYNKGLFRYDLSTGVMKEIKTSDNKELKIVRNIIKDHKGNIWVASSFGLKVLESADLYIDNPVLNSVKGLDELDYIVPVCEDLNHNIWYGTLGRGLRKIVDLDENHNACVENFSSADGLSSNTIKSIVNGTDGTLWISTNKGINSLNINTQRIRSYDIFDGLQDYEFMELSAGVMTDGTMIFGGVNGINVFRPNDFDVIDFNGSPTLVDFKIFNHSVEADSTYSAYFDKSVSFTEHIELPYNLNTFSFQFSSLDYRSPYKVGYEYMLEGVDDSWISTSAFHREAFYTKLPSGEYMFRLRVRNSDGVYSLNELSIPVIINPPFSRSAIAYVIYVLLAILFISIIVYNLMRVQRLKYELREEAIQKKSLELLNIEKQRFFSNISHELKTPLTLILAPITVLSERFSLDIDVKEKLAIIKRQAKKMLNLIELSHELQLNERNMLKVKPCMFSFNKFLKDITEDFMFMAKYDNKDFVVNYPNKNVNVYADYSMIEQMLNNLLTNSFKHTVQRDKVGIDISYHDQLLTIKVYDTGDGISEKDLPYIFDRFYQASNQGLKNIGGTGIGLAFTKRLIELHSGNIGVESKLGEGSTFTVNLPIIQNVTEADVIDETNEQEGETDLYVGDWDIKSIEIDSKYLRFLVYLVEDNTEMRSFLTEIIGQFFTLKSFANGKECLDGMNKEWPDIIVSDVMMPEMDGNELCNVIKSDLKTSHIPVILLTACNTVDDKIKGLQSGADAYIPKPFYPKHVLTRICTLLDNRAKLWERFQSGVPLNIAANENEVSAKDNEFICALYAKFNEYVDDECVDMELLAKEIGVNRSLFFQKVKALTNDSPFELLKNYRLQRAAELLVKEEYNVKEVCMMTGFKSRTHFSRLFKEKYGVAPSKYKESVVNRI

SEQ ID NO: 44 - DNA, 115 bp, Artificial Sequence
  Ppor10s6v7
tatgaggggtaaaaatgtcgaaaaagagggggtataatatcccctctttcttttttgaaaatcccctctattgttatgatggatacttcatactttagcatcgtcgaaaagataa

SEQ ID NO: 45 - DNA, 121 bp, Bacteroides nordii
gtagaaaatggactacaaaccactcaaacgccgaaaatttctacatttattatagttatcgatacatttaacgacagccttaataaaccattacgctacatttgtgcattcagtttttaaa

SEQ ID NO: 46 - DNA, 220 bp, Bacteroides ovatus
aataaagtcaaaagccagacatgcttcgtctggcttttgactttattatagcttggagagaaatacgggcgaggccgaatgcttacgctataatttcatgagaaaactaatattccacactcattttaaagcaaagatacttcttacatacttaaagatacattattattacgcaaaactttttattttgcgataattcgaagatttatttaattattta

SEQ ID NO: 47 - DNA, 24 bp, Artificial Sequence
  Ribosome binding site
cccatggcgataaaatataataaa

SEQ ID NO: 48 - DNA, 164 bp, Artificial Sequence
  Promoter
gataaaacgaaaggctcagtcgaaagactgggcctttcgttttacaattgggctaccttttttttgttttgtttgcaatggttaatctattgttaaaatttaaagtttcacttgaactttcaaataatgttcttatatttgcagtgtcgaaagaaacaaagtag

SEQ ID NO: 49 - DNA, 164 bp, Artificial Sequence
  Promoter
gataaaacgaaaggctcagtcgaaagactgggcctttcgttttacaattgggctaccttttttttgttttgtttgcaatggttaatctattgttgaaatttaaagtttcacttgaactttcaaataatgttcttatatttgcagtgtcgaaagaaacaaagtag

SEQ ID NO: 50 - DNA, 63 bp, Artificial Sequence
  Promoter
  misc_feature (6)..(12): N can be any nucleotide, and the Ns at these positions can be present or absent such that a total number of 4 to 7 Ns can be present
  misc_feature (18)..(55): N can be any nucleotide, and the Ns at these positions can be present or absent such that a total number of 34 to 38 Ns can be present
  misc_feature (58)..(59): N can be any nucleotide
gttaannnnnnngttaannnnnnnnnnnnnnnnnnnnnnnnnnnnnnnnnnnnnntanntttg

SEQ ID NO: 51 - protein, 1349 aa, Bacteroides nordii
MQKVLYLLTLLLITVYTYADVSPVVINRLTNNEGLSNSSVNVIYQDSNNLMWFGTWDGLNLYNSREFKTFKPNPNVPGNITNNIIRDIIETTKGRLWITTDNGINLYTPEAMRFQSFFYDNKENSIFKERSFLICKNSHNKVIASVYNTGLYYFDEELSDFILIRNLKETSLKKLFFDKDDNLWLFTDNNSLYRVNLDWSKNKPDIKDIKPVILSQSSHDVFYNLYTNQIWEQNENRHINIYDVPTETKITEIPFSKVISSIIFEKTGYVIGTANGLFSIQAQNHEITTLIEDIPVFSIYKGTQDILWVGTDGQGVIMLTPKNNRFTSYSLKNSSIYGLSPVRCFWENQNKQLFIGTKGSGLYIFQDDTTENLFAQFTTNNGLINNSVYALAGKENDICWIGTDGKGLNYWDYKTKKLYTLKMNEKLDIISVYAIYIQNDHTLWIGTNGFGLYKLTIDRSKTPYEVTEYKQFIYQDHNKKGLSNNVIFSIIPDDHNGLWIGTRGGGLNHLDTHTYTFTTYRFSEKEMSSISNNDIITLYKDPDHQLWIGTSLGLNLMQKDEKETISFKHYTEKDGMPNNTIHGIQADNDGNIWISTNKGLGKLSKNNDKIISYYQNDGLQNNEFSDGASYKSSYTNNLFFGGINGYNKFDPQSIPETTFSPRLNFDDFLINNENADIRKFTKKINGKKMIVLNHTENLIGFKFTPIDYISGMKCEIEYKLAPYEKNWIQMGTSQLIVLNKLPSDDYILKIRFNNANKIWSEDIYEIPIRILPPWWLSKWAYLFYFLTSISILFVIYSVVKNRIQMKHTLELSNLEKTKTEEIHQAKLRFFTNIAHEFSNSLTLILVPSEQLLKIRNMEPEAKRYVRTIHSNAGRMQKLIQELIEFRKAETGFLELQTEIVDIHEFVKYITDYFTNTAAQKNIQFSIQIQDDTNTWITDRSCFEKIVFNIISNAFKYTPINGYIHLSISQINEHLILQIKNNGKGIKKEDIHLIFNRFKILDQFEKQMAQGENRNGIGLALCKALTDLLKGTIEVESELNDYTQFTISLPALELTNKQPVSMPPLVTEEPPINTEYTDITELADTDTNNMSQTVILIVEDDKEISNLLYGLLKHKYSLLFASNGKEGVEMVEKNSIHLIISDIIMPEMNGIEFVNHLKGKSTTANIPVIFLSSRTSIDNQIEGLQTGADAYVGKPFNSMLLETTIDRLLTSRRSLKDFYASPLSAIEKIEGKTVHKEEKEFILKLTRIVSENIDNENLSIEMLSNEMGISKIMLYRKLKEIKEETPTEFIRKIRMNQVEKLLKMTNKTIQEIMFDCGFNNKAYFYHEFSKQFNLTPGEYRKKHGSKAMNE

SEQ ID NO: 52 - protein, 1311 aa, Bacteroides salyersiae
MKHTILVLLGLALSFFPARAYHFRSYQVEDGLSHNSVWAVMQDSKGFMWFGTNDGLNRFDGKKIKVYRKIQGDSLSIGNNFIHCLKEDSRGRFLIGTKQGLYLFDDKLEKFRHIDLDKNIKDDVSINAIMEDPSGNIWLACHGYGLYVLTPELTTKKHYLSGSDPYSLPSNYIWSIVQDYYGNIWLGTVGKGLVHFDPKEEKFTQMTQAKELGIDDPVIYSLYCDIDNNIWIGTATSGLIRYTPRSQKATHYINHVFNIKSIIEYSDHELIMGSDKGLVKFDRTLESFDLINDDTSFDNMTDKSIFSIARDKEGSFWIGTYFGGVNYYSPAINRFQYCYNSPHNSSKKNIISGFAENENGDIWIGTHNDGLYLFNPKSLSFKKPYDIGYHDVQSILSDQDKLYASLYGKGIHILNIKNGQVSASANDIGINHTINSIAKTSKGQILFTSEGGVISMDASGTLKTLDYLTNTPVKDIAEDYDGSIWFATHSKGLIRLTSDNRWEVFVNNPDNPKSLPGNNVNCVFQDSKFHIWAGTEGEGLVRFNAKEQNFEPILNDQSGLPSNIIYSILDDSDGNLWVSTGGGLVKISSDLKNIKTFAYIGDIQRIQYNLNCALRASDNRLYFGGTNGFITFNPKEITDNPNKPVVMVTGFQIASKEITLSESSPLKETISATKEITLRHDQSTFSFDFVALSYLSPEQNRYAYILEGFDKEWHYTSDNKAMYMNIPPGTYVFRVKGTNNDGVWSDETADITVKIKPPFWLSNLMIGLYIVLAIGIILYFIRRYHRFIERKNQEKIFKYQTAKEKEMYESKINFFTNIAHEIRTPLSLIAAPLEKIILSGDGNEQTRNNLGMIERNANRLLELINQLLDFRKIEEDMFHFKFKRQNVVKIVEKVYKQYYQTAKFNKLEISLEAEKNDIECNVDSEAIYKIVSNLIANAIKYAKSQILITVKERSGNLEIKIKDDGTGIEKQYMEKIFEPFFQIQDKNNAVRTGSGLGLSLSQSLAMKHNGKISIESEYGKNCNFTLTIPIADGTEEEVQETEAAIPEKSEMPEQSVVEAGTRIIIVEDNTDMRTFLCESLNDNYTVFEAENGVQALEMVEKENIDIIISDIMMPEMDGLELCNRLKSDPAYSHLPLVLLSAKTDTSTKIEGLNQGADVYMEKPFSIEQLKAQISSIIENRNNLRKNFIKSPLQYFKQNTENNESADFVKKLNTIILENMSDEDFSIDSLSSQFAISRSNLHKKIKNITGMTPNDYIKLIRLNESARMLSTGKYKINEVCFLVGFNTPSYFSKCFFEQFKKLPKDFIQITNE

SEQ ID NO: 53 - protein, 1326 aa, Artificial Sequence
  HTCS-17106
MFRLILSLISVLIIVCKSFASNEFVTRKYTTLDGLSQNDVQCIYQDSKGFIWLATNDGLNRFDGYEFKVYGYQSNGLNSNLIVCIDEDSHGNLWIGTADRGVFLFNSVKNEFVSLNLGHSGIDKNFTCDKILVDSKDRVWFHSSDESIYLVNYDFQNGKINTVLRSTLKLPYISDIIEIDNTIMLSSEDGLYECNVDGDELLLNKLLGCPIASAIVISSSQILYSNLENHQLCLYDKHTCKVSTLLENCDIRKMVYKNKRLFYATTSTVNVLTFDVLHAIESKPQVIATYSYSYPQTVVLDKNDILWIGFFKSGFMSIRENNKPIDLFRGIGNDHISSVYTFAKSDIYLGTEGSGLYHFNSITGNARLIPFTANRIVYSTAYSNYTDCMYVSLMYDGIYSFTSDNDYKKISGLRNVRAMLADGKYLWIGTYNKGLFRYDLSTGVMKEIKTSDNKELKIVRNIIKDHKGNIWVASSFGLKVLESADLYIDNPVLNSVKGLDELDYIVPVCEDLNHNIWYGTLGRGLRKIVDLDENHNACVENFSSADGLSSNTIKSIVNGTDGTLWISTNKGINSLNINTQRIRSYDIFDGLQDYEFMELSAGVMTDGTMIFGGVNGINVFRPNDFDVIDFNGSPTLVDFKIFNHSVEADSTYSAYFDKSVSFTEHIELPYNLNTFSFQFSSLDYRSPYKVGYEYMLEGVDDSWISTSAFHREAFYTKLPSGEYMFRLRVRNSDGVYSLNELSIPVIINPPFWLSKWAYLFYFLTSISILFVIYSVVKNRIQMKHTLELSNLEKTKTEEIHQAKLRFFTNIAHEFSNSLTLILVPSEQLLKIRNMEPEAKRYVRTIHSNAGRMQKLIQELIEFRKAETGFLELQTEIVDIHEFVKYITDYFTNTAAQKNIQFSIQIQDDTNTWITDRSCFEKIVFNIISNAFKYTPINGYIHLSISQINEHLILQIKNNGKGIKKEDIHLIFNRFKILDQFEKQMAQGENRNGIGLALCKALTDLLKGTIEVESELNDYTQFTISLPALELTNKQPVSMPPLVTEEPPINTEYTDITELADTDTNNMSQTVILIVEDDKEISNLLYGLLKHKYSLLFASNGKEGVEMVEKNSIHLIISDIIMPEMNGIEFVNHLKGKSTTANIPVIFLSSRTSIDNQIEGLQTGADAYVGKPFNSMLLETTIDRLLTSRRSLKDFYASPLSAIEKIEGKTVHKEEKEFILKLTRIVSENIDNENLSIEMLSNEMGISKIMLYRKLKEIKEETPTEFIRKIRMNQVEKLLKMTNKTIQEIMFDCGFNNKAYFYHEFSKQFNLTPGEYRKKHGSKAMNE

SEQ ID NO: 54 - protein, 1303 aa, Artificial Sequence
  HTCS-10809
MFRLILSLISVLIIVCKSFASNEFVTRKYTTLDGLSQNDVQCIYQDSKGFIWLATNDGLNRFDGYEFKVYGYQSNGLNSNLIVCIDEDSHGNLWIGTADRGVFLFNSVKNEFVSLNLGHSGIDKNFTCDKILVDSKDRVWFHSSDESIYLVNYDFQNGKINTVLRSTLKLPYISDIIEIDNTIMLSSEDGLYECNVDGDELLLNKLLGCPIASAIVISSSQILYSNLENHQLCLYDKHTCKVSTLLENCDIRKMVYKNKRLFYATTSTVNVLTFDVLHAIESKPQVIATYSYSYPQTVVLDKNDILWIGFFKSGFMSIRENNKPIDLFRGIGNDHISSVYTFAKSDIYLGTEGSGLYHFNSITGNARLIPFTANRIVYSTAYSNYTDCMYVSLMYDGIYSFTSDNDYKKISGLRNVRAMLADGKYLWIGTYNKGLFRYDLSTGVMKEIKTSDNKELKIVRNIIKDHKGNIWVASSFGLKVLESADLYIDNPVLNSVKGLDELDYIVPVCEDLNHNIWYGTLGRGLRKIVDLDENHNACVENFSSADGLSSNTIKSIVNGTDGTLWISTNKGINSLNINTQRIRSYDIFDGLQDYEFMELSAGVMTDGTMIFGGVNGINVFRPNDFDVIDFNGSPTLVDFKIFNHSVEADSTYSAYFDKSVSFTEHIELPYNLNTFSFQFSSLDYRSPYKVGYEYMLEGVDDSWISTSAFHREAFYTKLPSGEYMFRLRVRNSDGVYSLNELSIPVIINPPFWLSNLMIGLYIVLAIGIILYFIRRYHRFIERKNQEKIFKYQTAKEKEMYESKINFFTNIAHEIRTPLSLIAAPLEKIILSGDGNEQTRNNLGMIERNANRLLELINQLLDFRKIEEDMFHFKFKRQNVVKIVEKVYKQYYQTAKFNKLEISLEAEKNDIECNVDSEAIYKIVSNLIANAIKYAKSQILITVKERSGNLEIKIKDDGTGIEKQYMEKIFEPFFQIQDKNNAVRTGSGLGLSLSQSLAMKHNGKISIESEYGKNCNFTLTIPIADGTEEEVQETEAAIPEKSEMPEQSVVEAGTRIIIVEDNTDMRTFLCESLNDNYTVFEAENGVQALEMVEKENIDIIISDIMMPEMDGLELCNRLKSDPAYSHLPLVLLSAKTDTSTKIEGLNQGADVYMEKPFSIEQLKAQISSIIENRNNLRKNFIKSPLQYFKQNTENNESADFVKKLNTIILENMSDEDFSIDSLSSQFAISRSNLHKKIKNITGMTPNDYIKLIRLNESARMLSTGKYKINEVCFLVGFNTPSYFSKCFFEQFKKLPKDFIQITNE

SEQ ID NO: 55 - DNA, 9041 bp, Artificial Sequence
  pWW1266
gtctttttaagaacaatcccaatacagtctgttactgtaatttctttcgggcatcgtatctattattgagtgtaatggtacgatgctttttttgttttatactatgaaatgaagttaaagatttatttttttcttgattgattttgatacgcattctaaagtggaaaatatctataattatctattaactactgtaaatacttgatgttttagataaaatcaataactttgtaatcttgatgaaatataaagaataatagttaaatgtttagattaatcttaagtttaatatcagttctgattatagtttgcaaatcctttgcatccaatgagtttgtcacaagaaagtacactactcttgatggactttcccaaaatgatgtgcaatgtatttatcaagactcaaaaggctttatatggttggccacgaacgacggactgaacaggtttgacggatatgaatttaaggtttacggatatcagtcaaacggtcttaacagtaatctgatagtatgtattgacgaagattcacatggaaatctgtggataggtacagccgatagaggagtgttcctgttcaattctgtaaagaacgaattcgtttcattaaatcttggtcacagcggtattgataaaaatttcacttgcgataagattcttgtcgactctaaagacagagtctggtttcattcctctgatgaaagtatataccttgtaaattatgattttcaaaatggcaaaataaatactgtcttaagatcaacattaaaattaccatacatttccgacatcatagaaatagataatacgataatgctctcctccgaagatggcctgtacgaatgtaacgtcgatggagatgaattactgcttaacaaactattgggatgccctatagcttcagccatagtcatctcatcttctcaaatattgtactcaaatctggaaaatcatcaattatgtttatacgacaagcatacctgcaaggtaagtaccctgttggaaaactgtgatatacgaaaaatggtatataaaaacaaaagattattttatgccactacaagcactgtgaatgtgttgacttttgatgtattgcatgccatcgagtcaaaaccacaggttattgctacatattcttacagctatccgcaaactgtagttcttgataaaaacgatattctttggataggatttttcaagagtggctttatgagtatacgcgaaaataataaacctatagatttattcagaggaataggaaatgatcatatatcgtccgtttatacatttgccaaatctgatatatatttaggcacagaaggctcagggctatatcattttaattccattaccggtaatgccagacttattcctttcacggcaaacaggatagtatactcaacagcatactcaaactacaccgactgcatgtatgtgtctctgatgtacgatggtatttacagtttcacttctgataatgattataaaaagatctcaggtttgagaaatgtgcgcgcaatgcttgccgatggaaaatatttgtggattggcacatataataaaggtcttttcagatatgatttgtccacaggtgtgatgaaggaaatcaaaacatctgacaataaagaacttaagatagtaagaaacatcattaaagatcataagggtaatatatgggtagcttccagcttcggtcttaaagtattggaatctgcagatttgtatatagataatcctgttttgaactcagtcaagggacttgatgaactcgactatatagtgcctgtatgtgaagatttgaatcataatatctggtatggaacacttggacgtgggttaaggaaaatcgtggatttggatgaaaaccataatgcctgcgttgaaaattttagctctgcagacgggttgagcagcaatacaataaaatcaattgttaatggcacggatggaacattatggatttctaccaataaaggaattaattcgttgaatatcaacacacagagaataagatcttatgatattttcgatggacttcaggattatgaatttatggaactttctgctggagtaatgacggatggaacaatgatattcggtggcgtaaacggaattaacgtctttagacctaatgactttgatgtgatagatttcaacggtagtcctacactcgttgattttaaaatcttcaatcacagcgttgaggcagattccacatattcagcttatttcgacaaaagtgtaagttttacagagcacattgaattgccttataatttaaacactttctcattccagttcagctccctggattacagaagtccttataaggttggttacgaatatatgctcgaaggcgtagatgattcatggatttccacctccgcttttcatcgtgaggctttctacacaaagcttccttcaggcgaatatatgttcagactgagggtcaggaatagcgatggagtctacagtttgaatgaactttccatacctgtcattattaaccctcctttctggttatccaagtgggcctatttgttttactttctgacatcaatttccattctttttgtgatttactcagtggtcaagaaccgtattcagatgaaacacaccctggagttaagcaaccttgaaaaaacgaaaacagaagagatccatcaggctaaattgcgcttttttaccaatattgcgcacgagttctcgaacagcctgactctgatcctggtaccgagcgaacagctgctgaagatccgcaatatggaaccggaagcgaagcggtacgtacggaccattcatagcaacgcgggtcgcatgcaaaaactcattcaggaattgattgaatttcgtaaagccgaaacaggcttcctggaactgcagacagaaattgtagacattcatgagtttgttaaatatatcaccgattacttcacaaatacagcggcgcagaagaacattcagttttctatacaaattcaggatgacactaacacctggattaccgatcgtagttgtttcgaaaagatcgtgttcaatattattagcaacgcttttaaatataccccaattaatgggtacattcacctgagcattagtcagattaatgaacacctgatcttgcagattaaaaataacggcaaaggcattaagaaagaagatattcatctgatcttcaatcgtttcaagatcttagaccagtttgagaaacaaatggcacagggcgagaaccgtaacggcattggtctggccctgtgcaaagctctgaccgacctgctgaaaggtactatcgaggtggaaagtgaattgaacgattacacacagttcaccatcagcctgcctgccctcgaactgacaaataaacaaccggtttcaatgcccccgctggttacagaagaacccccgattaacactgaatacaccgacataaccgaactggccgacactgacactaataacatgagccagaccgttatcctgattgtagaagatgacaaagaaatttctaatctgctgtacggcttactgaaacataaatattctttgctttttgcctccaacggcaaagaaggtgttgagatggtagaaaaaaacagcattcatctcattatctcagacattatcatgccagaaatgaacggtatcgaattcgtgaaccatcttaaaggcaaatcgacaaccgccaatattccagtcatcttcctgtcatcccgcacaagcatcgataaccagattgaaggattgcaaacaggggcagacgcttacgtaggcaaaccgttcaattcgatgctgctcgaaactaccattgaccgcctgttgacaagccgccgttccctgaaagatttctacgcgagtccactcagcgccatcgagaagatcgaagggaaaactgttcacaaagaagaaaaagaattcatcctgaaattgaccagaatcgtgtccgaaaacatcgacaatgaaaatctgtctattgagatgctgtcaaacgaaatgggaatcagcaaaatcatgctgtatcgcaaactgaaagaaattaaagaagagacaccgacagaatttattcgtaagatccgcatgaatcaagttgaaaaactgctcaagatgacgaacaagacaattcaggaaatcatgtttgattgcggtttcaacaacaaagcctacttttatcacgaattctcaaagcaatttaatctgacaccgggtgagtaccgcaaaaaacacggctccaaagcgatgaacgaataatgcgaaggccatcctgacggatggccttttttttgacttgagaccggctattacgagcgcttaaacggcgcgcctgataggtgggctgcccttcctggttggcttggtttcatcagccatccgcttgccctcatctgttacgccggcggtagccggccagcctcgcagagcaggattcccgttgagcaccgccaggtgcgaataagggacagtgaagaaggaacacccgctcgcgggtgggcctacttcacctatcctgcccggctgacgccgttggatacaccaaggaaagtctacacgaaccctttggcaaaatcctgtatatcgtgcgaaaaaggatggatataccgaaaaaatcgctataatgaccccgaagcagggttatgcagcggaaaagcgggattaaaagtcggggattggtgaacaaaaaggtgtttctctctttaagagaaatatcgttttgctaaacagttgatattgaggtatcattttatcgtaaaagacatttttgctcaacaattgcttgacggaaatcaacaaattttagcattttgtaaaaaagtcgctatataatttggtgaattggagttattttcatatttttgcatcccgaagagtttctcttaaagagagaaacatcttttgcataccttttccgaccgaatttttatgtcgtaaagaggggctttgcagggggtggactcagaaagatgagaatagatgactattgtagttgaaacacatagaaagttgctgatatacagaccgatacgcatatcgggatgaaccatgagtacgttcttttctcaaaaaacataaatattcgaaaagagatgcaataaattaaggagaggttataatgaacaaagtaaatataaaagatagtcaaaattttattacttcaaaatatcacatagaaaaaataatgaattgcataagtttagatgaaaaagataacatctttgaaataggtgcagggaaaggtcattttactgctggattggtaaagagatgtaattttgtaacggcgatagaaattgattctaaattatgtgaggtaactcgtaataagctcttaaattatcctaactatcaaatagtaaatgatgatatactgaaatttacatttcctagccacaatccatataaaatatttggcagcataccttacaacataagcacaaatataattcgaaaaattgtttttgaaagttcagccacaataagttatttaatagtggaatatggttttgctaaaatgttattagatacaaacagatcactagcattgctgttaatggcagaggtagatatttctatattagcaaaaattcctaggtattatttccatccaaaacctaaagtggatagcacattaattgtattaaaaagaaagccagcaaaaatggcatttaaagagagaaaaaaatatgaaacttttgtaatgaaatgggttaacaaagagtacgaaaaactgtttacaaaaaatcaatttaataaagctttaaaacatgcgagaatatatgatataaacaatattagtttcgaacaatttgtatcgctatttaatagttataaaatatttaacggctaaaaacaataggccacatgcaactgtaaatgtttacgcgggtaccgacaccgcggtggaggggaattacgagtcattggtaactatctatgaaactgtttgatacttttatagttgattaaacttgttcatggcatttgccttaatatcatccgctatgtcaatgtagggtttcatagctttgtagtcgctgtgtcccgtccatttcatgaccacctgtgccgggattccgagagccagcgcattgcagatgaatgtcctttttcctgcatgggtactgagcaaagcgtatttgggtgtgacttcatcaatacgttcatttcccttgtagtaggtttcccgtacaggctcgttgatttctgccagttcgcccagctctttcaggtaatcgttcatcttctggttgctgatgacgggcagagccatgtaattctcgaaatggatgtccttgtatttgtccagtatggctttgctgtatttgttcagttcaatcgtcaggctgtcggcagtcttgactgtggttatttcgatgtggtcggacttcacatcgcttcttttcagattgcgaacatccgaataccgcaaactcgtaaagcagcagaacaggaaaacatcacgcacacgttccaggtattgcttatccttgggtatctggtagtctttcagcttgttcagttcatcccaagtcaggaagattacttttttcgaggtggttttcagtttcggtttgaacgtatcgtatgcaatgttctgatgatgtcctttcttgaagctccagcgcaggaaccatttgaggaatcccatttgcttgccgatggtgctgtttctcatatccttggtgtcacgcaggaagttgacgtattcgttcaatccaaactcgttgaaatagttgaacgttgcatcctccttgaactctttgaggtggttcctcactgctgcaaatttttcataggtggatgccgtccagttattctggttaccgcactcttttacaaactcatcgaacacctcccaaaagctgacaggggcttcttccggctgttcttcactggtatctttcattctcatgttgaaagcttccttcaactgttgggtcgttggcatgacctcctgcacctcaaattccttgaaaatattctggatttcggcatagtatttcagcaagtccgtattgatttcggctgcactttgctttagcttgttggtacatccgttctttacccgctgcttatctgcatcccatttggctacgtcaatccggtagcccgttgtaaactcgatacgttggctggcaaagatgacacgcatacggatgggtacgttctctacgattggcacaccgttctttttccggctctccaatgcaaaaatgatgttgcgcttgatattcataattgggtgcgtttgaaattctacacccaaatatacacccaattattgagatagcaaaagacatttagaaacatttacttttactctatattgtaatttacacttgattatcagtcgtttgcagtcttatgatattctgtgaaagtataagttcgagagcctgtctctccgcaaaaaacgctgaaaatcagcagattgcaaaacaaacaccctgttttacacccaagaatgtaaagtcgggtgtttttgttttatttaagataatacaaccactacataataaaagagtagcgatattaaaagaatccgatgagaaaagactaatatttatctatccattcagtttgatttctcaggactttacatcgtcctgaaagtatttgttgccagtgttacaaccaattaaccaattctgattagaaaaactcatcgagcatcaaatgaaactgcaatttattcatatcaggattatcaataccatatttttgaaaaagccgtttctgtaatgaaggagaaaactcaccgaggcagttccataggatggcaagatcctggtatcggtctgcgattccgactcgtccaacatcaatacaacctattaatttcccctcgtcaaaaataaggttatcaagtgagaaatcaccatgagtgacgactgaatccggtgagaatggcaaaagcttatgcatttctttccagacttgttcaacaggccagccattacgctcgtcatcaaaatcactcgcatcaaccaaaccgttattcattcgtgattgcgcctgagcgaggcgaaatacgcgatcgctgttaaaaggacaattacaaacaggaatcgaatgcaaccggcgcaggaacactgccagcgcatcaacaatattttcacctgaatcaggatattcttctaatacctggaatgctgttttcccggggatcgcagtggtgagtaaccatgcatcatcaggagtacggataaaatgcttgatggtcggaagaggcataaattccgtcagccagtttagtctgaccatctcatctgtaacatcattggcaacgctacctttgccatgtttcagaaacaactctggcgcatcgggcttcccatacaatcgatagattgtcgcacctgattgcccgacattatcgcgagcccatttatacccatataaatcagcatccatgttggaatttaatcgcggcctggagcaagacgtttcccgttgaatatggctcataacaccccttgtattactgtttatgtaagcagacagttttattgttcatgatgatatatttttatcttgtgcaatgtaacatcagagattttgagacacaacgtggctttgttgaataaatcgaacttttgctgagttgaaggatcagccgcgcagttcaacctgttgatagtacgtactaagctctcatgtttcacgtactaagctctcatgtttaacgtactaagctctcatgtttaacgaactaaaccctcatggctaacgtactaagctctcatggctaacgtactaagctctcatgtttcacgtactaagctctcatgtttgaacaataaaattaatataaatcagcaacttaaatagcctctaaggttttaagttttataagaaaaaaaagaatatataaggcttttaaagcttttaaggtttaacggttgtggacaacaagccagggatgtaacgcactgagaagcccttagagcctctcaaagcaattttgagtgacacaggaacacttaacggctgacatggggcggccgctcaacgtaccggtctcagtagggagagctgtatgtgggtag

SEQ ID NO: 56 - DNA, 8972 bp, Artificial Sequence
  pWW1265
gtctttttaagaacaatcccaatacagtctgttactgtaatttctttcgggcatcgtatctattattgagtgtaatggtacgatgctttttttgttttatactatgaaatgaagttaaagatttatttttttcttgattgattttgatacgcattctaaagtggaaaatatctataattatctattaactactgtaaatacttgatgttttagataaaatcaataactttgtaatcttgatgaaatataaagaataatagttaaatgtttagattaatcttaagtttaatatcagttctgattatagtttgcaaatcctttgcatccaatgagtttgtcacaagaaagtacactactcttgatggactttcccaaaatgatgtgcaatgtatttatcaagactcaaaaggctttatatggttggccacgaacgacggactgaacaggtttgacggatatgaatttaaggtttacggatatcagtcaaacggtcttaacagtaatctgatagtatgtattgacgaagattcacatggaaatctgtggataggtacagccgatagaggagtgttcctgttcaattctgtaaagaacgaattcgtttcattaaatcttggtcacagcggtattgataaaaatttcacttgcgataagattcttgtcgactctaaagacagagtctggtttcattcctctgatgaaagtatataccttgtaaattatgattttcaaaatggcaaaataaatactgtcttaagatcaacattaaaattaccatacatttccgacatcatagaaatagataatacgataatgctctcctccgaagatggcctgtacgaatgtaacgtcgatggagatgaattactgcttaacaaactattgggatgccctatagcttcagccatagtcatctcatcttctcaaatattgtactcaaatctggaaaatcatcaattatgtttatacgacaagcatacctgcaaggtaagtaccctgttggaaaactgtgatatacgaaaaatggtatataaaaacaaaagattattttatgccactacaagcactgtgaatgtgttgacttttgatgtattgcatgccatcgagtcaaaaccacaggttattgctacatattcttacagctatccgcaaactgtagttcttgataaaaacgatattctttggataggatttttcaagagtggctttatgagtatacgcgaaaataataaacctatagatttattcagaggaataggaaatgatcatatatcgtccgtttatacatttgccaaatctgatatatatttaggcacagaaggctcagggctatatcattttaattccattaccggtaatgccagacttattcctttcacggcaaacaggatagtatactcaacagcatactcaaactacaccgactgcatgtatgtgtctctgatgtacgatggtatttacagtttcacttctgataatgattataaaaagatctcaggtttgagaaatgtgcgcgcaatgcttgccgatggaaaatatttgtggattggcacatataataaaggtcttttcagatatgatttgtccacaggtgtgatgaaggaaatcaaaacatctgacaataaagaacttaagatagtaagaaacatcattaaagatcataagggtaatatatgggtagcttccagcttcggtcttaaagtattggaatctgcagatttgtatatagataatcctgttttgaactcagtcaagggacttgatgaactcgactatatagtgcctgtatgtgaagatttgaatcataatatctggtatggaacacttggacgtgggttaaggaaaatcgtggatttggatgaaaaccataatgcctgcgttgaaaattttagctctgcagacgggttgagcagcaatacaataaaatcaattgttaatggcacggatggaacattatggatttctaccaataaaggaattaattcgttgaatatcaacacacagagaataagatcttatgatattttcgatggacttcaggattatgaatttatggaactttctgctggagtaatgacggatggaacaatgatattcggtggcgtaaacggaattaacgtctttagacctaatgactttgatgtgatagatttcaacggtagtcctacactcgttgattttaaaatcttcaatcacagcgttgaggcagattccacatattcagcttatttcgacaaaagtgtaagttttacagagcacattgaattgccttataatttaaacactttctcattccagttcagctccctggattacagaagtccttataaggttggttacgaatatatgctcgaaggcgtagatgattcatggatttccacctccgcttttcatcgtgaggctttctacacaaagcttccttcaggcgaatatatgttcagactgagggtcaggaatagcgatggagtctacagtttgaatgaactttccatacctgtcattattaaccctcctttctggctgagcaaccttatgatcggcctgtacattgtattggcaattggcattatcctttattttattcgccgttaccatcgtttcatcgagcgtaaaaatcaagaaaagatcttcaaataccagaccgcaaaagagaaagagatgtacgagtctaagattaactttttcaccaatattgcacacgagattcgcactccgctgtcgctgatcgcagcacctttagagaaaattattctgtccggcgacgggaacgaacaaacacgcaataacctgggcatgattgaacgtaacgccaaccgcttactggaactgataaatcagcttttagatttccgcaagattgaagaagatatgttccacttcaaattcaaacgtcaaaacgttgtaaaaattgttgaaaaggtgtacaaacagtactatcaaaccgccaaatttaataagctcgaaatttccctggaagctgaaaaaaatgatatcgaatgtaacgttgacagtgaagcgatctacaagatcgtttcgaacctgatcgctaacgcaatcaaatacgctaagtcgcaaattttgatcaccgttaaggaacgctccggtaaccttgaaattaagattaaagatgacggaaccggcattgaaaaacaatatatggagaagattttcgagccgttctttcagattcaagacaagaacaatgcagtgcgaactggctcaggcctgggtttatctttatcccagtccctggcgatgaaacataacgggaagatcagtatcgaatccgaatatggcaaaaactgtaactttacattaactatccctattgcagatggcacagaagaggaagtccaagaaactgaagccgctattccagaaaaaagtgaaatgccagaacaaagcgtagttgaggcaggtactcggatcatcattgtcgaagataacaccgatatgcgtacttttctgtgcgaaagcctgaacgacaactatacagtctttgaggctgaaaacggcgtacaggcactggaaatggtcgaaaaagaaaacattgacattattatctctgatattatgatgcctgagatggatggcctggaactgtgcaaccgccttaagtccgaccccgcgtattcgcacctgccattagttctgctctcagcaaagaccgacacttccactaaaattgaaggtctgaaccaaggggcggatgtgtacatggagaagccatttagcatcgaacagctgaaagcgcagatctctagcatcattgaaaatcgcaacaacctccgcaaaaactttatcaaatctccgctccagtatttcaagcagaacaccgagaacaacgaaagtgctgatttcgtaaaaaaactgaacactatcattctggaaaatatgagtgacgaagattttagcatcgatagtctctctagccaattcgccatctcgcgctcaaatctgcacaagaaaatcaagaacattactggcatgactccgaacgattacattaagctgatccgcttgaacgaatctgcgcgcatgctgagtaccggtaaatataagattaatgaggtatgcttcctggtaggcttcaacaccccttcatatttttccaaatgctttttcgaacagttcaagaaactgccaaaagatttcatccaaattactaacgagtaatgcgaaggccatcctgacggatggccttttttttgacttgagaccggctattacgagcgcttaaacggcgcgcctgataggtgggctgcccttcctggttggcttggtttcatcagccatccgcttgccctcatctgttacgccggcggtagccggccagcctcgcagagcaggattcccgttgagcaccgccaggtgcgaataagggacagtgaagaaggaacacccgctcgcgggtgggcctacttcacctatcctgcccggctgacgccgttggatacaccaaggaaagtctacacgaaccctttggcaaaatcctgtatatcgtgcgaaaaaggatggatataccgaaaaaatcgctataatgaccccgaagcagggttatgcagcggaaaagcgggattaaaagtcggggattggtgaacaaaaaggtgtttctctctttaagagaaatatcgttttgctaaacagttgatattgaggtatcattttatcgtaaaagacatttttgctcaacaattgcttgacggaaatcaacaaattttagcattttgtaaaaaagtcgctatataatttggtgaattggagttattttcatatttttgcatcccgaagagtttctcttaaagagagaaacatcttttgcataccttttccgaccgaatttttatgtcgtaaagaggggctttgcagggggtggactcagaaagatgagaatagatgactattgtagttgaaacacatagaaagttgctgatatacagaccgatacgcatatcgggatgaaccatgagtacgttcttttctcaaaaaacataaatattcgaaaagagatgcaataaattaaggagaggttataatgaacaaagtaaatataaaagatagtcaaaattttattacttcaaaatatcacatagaaaaaataatgaattgcataagtttagatgaaaaagataacatctttgaaataggtgcagggaaaggtcattttactgctggattggtaaagagatgtaattttgtaacggcgatagaaattgattctaaattatgtgaggtaactcgtaataagctcttaaattatcctaactatcaaatagtaaatgatgatatactgaaatttacatttcctagccacaatccatataaaatatttggcagcataccttacaacataagcacaaatataattcgaaaaattgtttttgaaagttcagccacaataagttatttaatagtggaatatggttttgctaaaatgttattagatacaaacagatcactagcattgctgttaatggcagaggtagatatttctatattagcaaaaattcctaggtattatttccatccaaaacctaaagtggatagcacattaattgtattaaaaagaaagccagcaaaaatggcatttaaagagagaaaaaaatatgaaacttttgtaatgaaatgggttaacaaagagtacgaaaaactgtttacaaaaaatcaatttaataaagctttaaaacatgcgagaatatatgatataaacaatattagtttcgaacaatttgtatcgctatttaatagttataaaatatttaacggctaaaaacaataggccacatgcaactgtaaatgtttacgcgggtaccgacaccgcggtggaggggaattacgagtcattggtaactatctatgaaactgtttgatacttttatagttgattaaacttgttcatggcatttgccttaatatcatccgctatgtcaatgtagggtttcatagctttgtagtcgctgtgtcccgtccatttcatgaccacctgtgccgggattccgagagccagcgcattgcagatgaatgtcctttttcctgcatgggtactgagcaaagcgtatttgggtgtgacttcatcaatacgttcatttcccttgtagtaggtttcccgtacaggctcgttgatttctgccagttcgcccagctctttcaggtaatcgttcatcttctggttgctgatgacgggcagagccatgtaattctcgaaatggatgtccttgtatttgtccagtatggctttgctgtatttgttcagttcaatcgtcaggctgtcggcagtcttgactgtggttatttcgatgtggtcggacttcacatcgcttcttttcagattgcgaacatccgaataccgcaaactcgtaaagcagcagaacaggaaaacatcacgcacacgttccaggtattgcttatccttgggtatctggtagtctttcagcttgttcagttcatcccaagtcaggaagattacttttttcgaggtggttttcagtttcggtttgaacgtatcgtatgcaatgttctgatgatgtcctttcttgaagctccagcgcaggaaccatttgaggaatcccatttgcttgccgatggtgctgtttctcatatccttggtgtcacgcaggaagttgacgtattcgttcaatccaaactcgttgaaatagttgaacgttgcatcctccttgaactctttgaggtggttcctcactgctgcaaatttttcataggtggatgccgtccagttattctggttaccgcactcttttacaaactcatcgaacacctcccaaaagctgacaggggcttcttccggctgttcttcactggtatctttcattctcatgttgaaagcttccttcaactgttgggtcgttggcatgacctcctgcacctcaaattccttgaaaatattctggatttcggcatagtatttcagcaagtccgtattgatttcggctgcactttgctttagcttgttggtacatccgttctttacccgctgcttatctgcatcccatttggctacgtcaatccggtagcccgttgtaaactcgatacgttggctggcaaagatgacacgcatacggatgggtacgttctctacgattggcacaccgttctttttccggctctccaatgcaaaaatgatgttgcgcttgatattcataattgggtgcgtttgaaattctacacccaaatatacacccaattattgagatagcaaaagacatttagaaacatttacttttactctatattgtaatttacacttgattatcagtcgtttgcagtcttatgatattctgtgaaagtataagttcgagagcctgtctctccgcaaaaaacgctgaaaatcagcagattgcaaaacaaacaccctgttttacacccaagaatgtaaagtcgggtgtttttgttttatttaagataatacaaccactacataataaaagagtagcgatattaaaagaatccgatgagaaaagactaatatttatctatccattcagtttgatttctcaggactttacatcgtcctgaaagtatttgttgccagtgttacaaccaattaaccaattctgattagaaaaactcatcgagcatcaaatgaaactgcaatttattcatatcaggattatcaataccatatttttgaaaaagccgtttctgtaatgaaggagaaaactcaccgaggcagttccataggatggcaagatcctggtatcggtctgcgattccgactcgtccaacatcaatacaacctattaatttcccctcgtcaaaaataaggttatcaagtgagaaatcaccatgagtgacgactgaatccggtgagaatggcaaaagcttatgcatttctttccagacttgttcaacaggccagccattacgctcgtcatcaaaatcactcgcatcaaccaaaccgttattcattcgtgattgcgcctgagcgaggcgaaatacgcgatcgctgttaaaaggacaattacaaacaggaatcgaatgcaaccggcgcaggaacactgccagcgcatcaacaatattttcacctgaatcaggatattcttctaatacctggaatgctgttttcccggggatcgcagtggtgagtaaccatgcatcatcaggagtacggataaaatgcttgatggtcggaagaggcataaattccgtcagccagtttagtctgaccatctcatctgtaacatcattggcaacgctacctttgccatgtttcagaaacaactctggcgcatcgggcttcccatacaatcgatagattgtcgcacctgattgcccgacattatcgcgagcccatttatacccatataaatcagcatccatgttggaatttaatcgcggcctggagcaagacgtttcccgttgaatatggctcataacaccccttgtattactgtttatgtaagcagacagttttattgttcatgatgatatatttttatcttgtgcaatgtaacatcagagattttgagacacaacgtggctttgttgaataaatcgaacttttgctgagttgaaggatcagccgcgcagttcaacctgttgatagtacgtactaagctctcatgtttcacgtactaagctctcatgtttaacgtactaagctctcatgtttaacgaactaaaccctcatggctaacgtactaagctctcatggctaacgtactaagctctcatgtttcacgtactaagctctcatgtttgaacaataaaattaatataaatcagcaacttaaatagcctctaaggttttaagttttataagaaaaaaaagaatatataaggcttttaaagcttttaaggtttaacggttgtggacaacaagccagggatgtaacgcactgagaagcccttagagcctctcaaagcaattttgagtgacacaggaacacttaacggctgacatggggcggccgctcaacgtaccggtctcagtagggagagctgtatgtgggtag

SEQ ID NO: 57 - DNA, 6734 bp, Artificial Sequence
  HTCS-17106 luciferase repoter construct
atattgttatgctaaatctttatttcagatattattgcgctgtatactcgtttgctaaataaacatactttaaagtattgaatggttcttatatttgtgcctcaattaatcgtattactaacctgagctgtcaccggatgtgctttccggtctgatgagtccgtgaggacgaaacagcctctacaaataattttgtttaatccatcaatttaaaatttaaaataatggtttttactctggaagattttgttggcgattggcgtcagaccgcgggttataatttggatcaagtcctggaacagggtggcgtaagctctctgttccagaacctgggtgtgagcgtgacgccgattcagcgcatcgttctgtccggcgagaacggtctgaaaattgatattcatgtgatcatcccgtacgaaggcctgagcggtgaccaaatgggtcaaatcgagaaaatctttaaagtcgtctacccagttgacgatcaccacttcaaggttatcttgcattacggtacgctggtgattgatggtgtgaccccgaatatgattgactatttcggccgtccgtatgaaggcattgccgtttttgacggtaaaaagatcaccgtcaccggtaccctgtggaatggcaataagattattgacgagcgtctgattaacccggacggcagcctgctgttccgcgtgaccatcaacggtgtcacgggttggcgtctgtgcgagcgcatcctggcataaggttcctagctgattagaaggccatcctgacggatggccttttttttgactgctatgacttgagaccggctattacgagcgcttaaacggcgcgcctgataggtgggctgcccttcctggttggcttggtttcatcagccatccgcttgccctcatctgttacgccggcggtagccggccagcctcgcagagcaggattcccgttgagcaccgccaggtgcgaataagggacagtgaagaaggaacacccgctcgcgggtgggcctacttcacctatcctgcccggctgacgccgttggatacaccaaggaaagtctacacgaaccctttggcaaaatcctgtatatcgtgcgaaaaaggatggatataccgaaaaaatcgctataatgaccccgaagcagggttatgcagcggaaaagttatatacattcatgtccatttatgtaaaaaatcctgctgaccttgtttatgtcttgtcagtcaccatttgcaaaaccatatttgaccctcaaagaggctgaatttgataagcaacttgctacatactcataataaggagctaaatagaacacgaatgggaaatactcaaatgccaaactaaagaagatattggccaaaataaacgctataccgagagagaaacttgatttttcaacttcctaaaacagtgttgttcaaacatttctacttatttgtacttaccagttgaacctacgtttccctaataaaatgtctatggtaaaaagttaaaaaatcctcctacttttgttagatatatttttttgtgtaattttgtaatcgttatgcggcagtaataatatacatattaatacgagttaggaatcctgtagttctcatatgctacgaggaggtattaaaaggtgcgtttcgacaatgcatctattgtagtatattattgcttaatccaaatgaatattataaatttaggaattcttgctcacattgatgcaggaaaaacttccgtaaccgagaatctgctgtttgccagtggagcaacggaaaagtgcggctgtgtggataatggtgacaccataacggactctatggatatagagaaacgtagaggaattactgttcgggcttctacgacatctattatctggaatggtgtgaaatgcaatatcattgacactccgggacacatggattttattgcggaagtggagcggacattcaaaatgcttgatggagcagtcctcatcttatccgcaaaggaaggcatacaagcgcagacaaagttgctgttcaatactttacagaagctgcaaatcccgacaattatatttatcaataagattgaccgagccggtgtgaatttggagcgtttgtatctggatataaaagcaaatctgtctcaagatgtcctgtttatgcaaaatgttgtcgatggatcggtttatccggtttgctcccaaacatatataaaggaagaatacaaagaatttgtatgcaaccatgacgacaatatattagaacgatatttggcggatagcgaaatttcaccggctgattattggaatacgataatcgctcttgtggcaaaagccaaagtctatccggtgctacatggatcagcaatgttcaatatcggtatcaatgagttgttggacgccatcacttcttttatacttcctccggcatcggtttcaaacagactttcatcttatctttataagatagagcatgaccccaaaggacataaaagaagttttctaaaaataattgacggaagtctgagacttcgagatgttgtaagaatcaacgattcggaaaaattcatcaagattaaaaatctaaaaactatcaatcagggcagagagataaatgttgatgaagtgggcgccaatgatatcgcgattgtagaggatatggatgattttcgaatcggaaattatttaggtgctgaaccttgtttgattcaaggattatcgcatcagcatcccgctctcaaatcctccgtccggccagacaggcccgaagagagaagcaaggtgatatccgctctgaatacattgtggattgaagatccgtctttgtccttttccataaactcatatagtgatgaattggaaatctcgttatatggtttaacccaaaaggaaatcatacagacattgctggaagaacgattttccgtaaaggtccattttgatgagatcaagactatatacaaagaacgacctgtaaaaaaggtcaataagattattcagatcgaagtgccgcccaacccttattgggccacaatagggctgactcttgaacccttaccgttagggacagggttgcaaatcgaaagtgacatctcctatggttatctgaaccattcttttcaaaatgccgtttttgaagggattcgtatgtcttgccaatccgggttacatggatgggaagtgactgatctgaaagtaacttttactcaagccgagtattatagcccggtaagtacaccagctgatttcagacagctgaccccttatgtctttaggctggccttgcaacagtcaggtgtggacattctcgaaccgatgctctattttgagttgcagataccccaagcggcaagttccaaagctattacagatttgcaaaaaatgatgtctgagattgaagatatcagttgcaataatgagtggtgtcatattaaagggaaagttccattaaatacaagtaaagactatgcatcagaagtaagttcatacactaagggcttaggcatttttatggttaagccatgcgggtatcaaataacaaaaggcggttattctgataatatccgcatgaacgaaaaagataaacttttattcatgttccaaaaatcaatgtcatcaaaataaccacgagtcattggtaactatctatgaaactgtttgatacttttatagttgattaaacttgttcatggcatttgccttaatatcatccgctatgtcaatgtagggtttcatagctttgtagtcgctgtgtcccgtccatttcatgaccacctgtgccgggattccgagagccagcgcattgcagatgaatgtcctttttcctgcatgggtactgagcaaagcgtatttgggtgtgacttcatcaatacgttcatttcccttgtagtaggtttcccgtacaggctcgttgatttctgccagttcgcccagctctttcaggtaatcgttcatcttctggttgctgatgacgggcagagccatgtaattctcgaaatggatgtccttgtatttgtccagtatggctttgctgtatttgttcagttcaatcgtcaggctgtcggcagtcttgactgtggttatttcgatgtggtcggacttcacatcgcttcttttcagattgcgaacatccgaataccgcaaactcgtaaagcagcagaacaggaaaacatcacgcacacgttccaggtattgcttatccttgggtatctggtagtctttcagcttgttcagttcatcccaagtcaggaagattacttttttcgaggtggttttcagtttcggtttgaacgtatcgtatgcaatgttctgatgatgtcctttcttgaagctccagcgcaggaaccatttgaggaatcccatttgcttgccgatggtgctgtttctcatatccttggtgtcacgcaggaagttgacgtattcgttcaatccaaactcgttgaaatagttgaacgttgcatcctccttgaactctttgaggtggttcctcactgctgcaaatttttcataggtggatgccgtccagttattctggttaccgcactcttttacaaactcatcgaacacctcccaaaagctgacaggggcttcttccggctgttcttcactggtatctttcattctcatgttgaaagcttccttcaactgttgggtcgttggcatgacctcctgcacctcaaattccttgaaaatattctggatttcggcatagtatttcagcaagtccgtattgatttcggctgcactttgctttagcttgttggtacatccgttctttacccgctgcttatctgcatcccatttggctacgtcaatccggtagcccgttgtaaactcgatacgttggctggcaaagatgacacgcatacggatgggtacgttctctacgattggcacaccgttctttttccggctctccaatgcaaaaatgatgttgcgcttgatattcataattgggtgcgtttgaaattctacacccaaatatacacccaattattgagatagcaaaagacatttagaaacatttacttttactctatattgtaatttacacttgattatcagtcgtttgcagtcttatgatattctgtgaaagtataagttcgagagcctgtctctccgcaaaaaacgctgaaaatcagcagattgcaaaacaaacaccctgttttacacccaagaatgtaaagtcgggtgtttttgttttatttaagataatacaaccactacataataaaagagtagcgatattaaaagaatccgatgagaaaagactaatatttatctatccattcagtttgatttctcaggactttacatcgtcctgaaagtatttgttgccagtgttacaaccaattaaccaattctgattagaaaaactcatcgagcatcaaatgaaactgcaatttattcatatcaggattatcaataccatatttttgaaaaagccgtttctgtaatgaaggagaaaactcaccgaggcagttccataggatggcaagatcctggtatcggtctgcgattccgactcgtccaacatcaatacaacctattaatttcccctcgtcaaaaataaggttatcaagtgagaaatcaccatgagtgacgactgaatccggtgagaatggcaaaagcttatgcatttctttccagacttgttcaacaggccagccattacgctcgtcatcaaaatcactcgcatcaaccaaaccgttattcattcgtgattgcgcctgagcgaggcgaaatacgcgatcgctgttaaaaggacaattacaaacaggaatcgaatgcaaccggcgcaggaacactgccagcgcatcaacaatattttcacctgaatcaggatattcttctaatacctggaatgctgttttcccggggatcgcagtggtgagtaaccatgcatcatcaggagtacggataaaatgcttgatggtcggaagaggcataaattccgtcagccagtttagtctgaccatctcatctgtaacatcattggcaacgctacctttgccatgtttcagaaacaactctggcgcatcgggcttcccatacaatcgatagattgtcgcacctgattgcccgacattatcgcgagcccatttatacccatataaatcagcatccatgttggaatttaatcgcggcctggagcaagacgtttcccgttgaatatggctcataacaccccttgtattactgtttatgtaagcagacagttttattgttcatgatgatatatttttatcttgtgcaatgtaacatcagagattttgagacacaacgtggctttgttgaataaatcgaacttttgctgagttgaaggatcagccgcgcagttcaacctgttgatagtacgtactaagctctcatgtttcacgtactaagctctcatgtttaacgtactaagctctcatgtttaacgaactaaaccctcatggctaacgtactaagctctcatggctaacgtactaagctctcatgtttcacgtactaagctctcatgtttgaacaataaaattaatataaatcagcaacttaaatagcctctaaggttttaagttttataagaaaaaaaagaatatataaggcttttaaagcttttaaggtttaacggttgtggacaacaagccagggatgtaacgcactgagaagcccttagagcctctcaaagcaattttgagtgacacaggaacacttaacggctgacatggggcggccgctcaacgtaccggtctcagtagggagagctgtatgtgggtag

SEQ ID NO: 58 - DNA, 6753 bp, Artificial Sequence
  HTCS-10809 luciferase reporter construct
aataatcttagtttagtggggttgaatttcagaaaaataaatagttaaaacaatattcttctataaaaaaataagattattacatccccaaaatgatcttttccattactttgcccacaccaaaagggaacaaatcgttacctgagctgtcaccggatgtgctttccggtctgatgagtccgtgaggacgaaacagcctctacaaataattttgtttaatccatcaatttaaaatttaaaataatggtttttactctggaagattttgttggcgattggcgtcagaccgcgggttataatttggatcaagtcctggaacagggtggcgtaagctctctgttccagaacctgggtgtgagcgtgacgccgattcagcgcatcgttctgtccggcgagaacggtctgaaaattgatattcatgtgatcatcccgtacgaaggcctgagcggtgaccaaatgggtcaaatcgagaaaatctttaaagtcgtctacccagttgacgatcaccacttcaaggttatcttgcattacggtacgctggtgattgatggtgtgaccccgaatatgattgactatttcggccgtccgtatgaaggcattgccgtttttgacggtaaaaagatcaccgtcaccggtaccctgtggaatggcaataagattattgacgagcgtctgattaacccggacggcagcctgctgttccgcgtgaccatcaacggtgtcacgggttggcgtctgtgcgagcgcatcctggcataaggttcctagctgattagaaggccatcctgacggatggccttttttttgactgctatgacttgagaccggctattacgagcgcttaaacggcgcgcctgataggtgggctgcccttcctggttggcttggtttcatcagccatccgcttgccctcatctgttacgccggcggtagccggccagcctcgcagagcaggattcccgttgagcaccgccaggtgcgaataagggacagtgaagaaggaacacccgctcgcgggtgggcctacttcacctatcctgcccggctgacgccgttggatacaccaaggaaagtctacacgaaccctttggcaaaatcctgtatatcgtgcgaaaaaggatggatataccgaaaaaatcgctataatgaccccgaagcagggttatgcagcggaaaagttatatacattcatgtccatttatgtaaaaaatcctgctgaccttgtttatgtcttgtcagtcaccatttgcaaaaccatatttgaccctcaaagaggctgaatttgataagcaacttgctacatactcataataaggagctaaatagaacacgaatgggaaatactcaaatgccaaactaaagaagatattggccaaaataaacgctataccgagagagaaacttgatttttcaacttcctaaaacagtgttgttcaaacatttctacttatttgtacttaccagttgaacctacgtttccctaataaaatgtctatggtaaaaagttaaaaaatcctcctacttttgttagatatatttttttgtgtaattttgtaatcgttatgcggcagtaataatatacatattaatacgagttaggaatcctgtagttctcatatgctacgaggaggtattaaaaggtgcgtttcgacaatgcatctattgtagtatattattgcttaatccaaatgaatattataaatttaggaattcttgctcacattgatgcaggaaaaacttccgtaaccgagaatctgctgtttgccagtggagcaacggaaaagtgcggctgtgtggataatggtgacaccataacggactctatggatatagagaaacgtagaggaattactgttcgggcttctacgacatctattatctggaatggtgtgaaatgcaatatcattgacactccgggacacatggattttattgcggaagtggagcggacattcaaaatgcttgatggagcagtcctcatcttatccgcaaaggaaggcatacaagcgcagacaaagttgctgttcaatactttacagaagctgcaaatcccgacaattatatttatcaataagattgaccgagccggtgtgaatttggagcgtttgtatctggatataaaagcaaatctgtctcaagatgtcctgtttatgcaaaatgttgtcgatggatcggtttatccggtttgctcccaaacatatataaaggaagaatacaaagaatttgtatgcaaccatgacgacaatatattagaacgatatttggcggatagcgaaatttcaccggctgattattggaatacgataatcgctcttgtggcaaaagccaaagtctatccggtgctacatggatcagcaatgttcaatatcggtatcaatgagttgttggacgccatcacttcttttatacttcctccggcatcggtttcaaacagactttcatcttatctttataagatagagcatgaccccaaaggacataaaagaagttttctaaaaataattgacggaagtctgagacttcgagatgttgtaagaatcaacgattcggaaaaattcatcaagattaaaaatctaaaaactatcaatcagggcagagagataaatgttgatgaagtgggcgccaatgatatcgcgattgtagaggatatggatgattttcgaatcggaaattatttaggtgctgaaccttgtttgattcaaggattatcgcatcagcatcccgctctcaaatcctccgtccggccagacaggcccgaagagagaagcaaggtgatatccgctctgaatacattgtggattgaagatccgtctttgtccttttccataaactcatatagtgatgaattggaaatctcgttatatggtttaacccaaaaggaaatcatacagacattgctggaagaacgattttccgtaaaggtccattttgatgagatcaagactatatacaaagaacgacctgtaaaaaaggtcaataagattattcagatcgaagtgccgcccaacccttattgggccacaatagggctgactcttgaacccttaccgttagggacagggttgcaaatcgaaagtgacatctcctatggttatctgaaccattcttttcaaaatgccgtttttgaagggattcgtatgtcttgccaatccgggttacatggatgggaagtgactgatctgaaagtaacttttactcaagccgagtattatagcccggtaagtacaccagctgatttcagacagctgaccccttatgtctttaggctggccttgcaacagtcaggtgtggacattctcgaaccgatgctctattttgagttgcagataccccaagcggcaagttccaaagctattacagatttgcaaaaaatgatgtctgagattgaagatatcagttgcaataatgagtggtgtcatattaaagggaaagttccattaaatacaagtaaagactatgcatcagaagtaagttcatacactaagggcttaggcatttttatggttaagccatgcgggtatcaaataacaaaaggcggttattctgataatatccgcatgaacgaaaaagataaacttttattcatgttccaaaaatcaatgtcatcaaaataaccacgagtcattggtaactatctatgaaactgtttgatacttttatagttgattaaacttgttcatggcatttgccttaatatcatccgctatgtcaatgtagggtttcatagctttgtagtcgctgtgtcccgtccatttcatgaccacctgtgccgggattccgagagccagcgcattgcagatgaatgtcctttttcctgcatgggtactgagcaaagcgtatttgggtgtgacttcatcaatacgttcatttcccttgtagtaggtttcccgtacaggctcgttgatttctgccagttcgcccagctctttcaggtaatcgttcatcttctggttgctgatgacgggcagagccatgtaattctcgaaatggatgtccttgtatttgtccagtatggctttgctgtatttgttcagttcaatcgtcaggctgtcggcagtcttgactgtggttatttcgatgtggtcggacttcacatcgcttcttttcagattgcgaacatccgaataccgcaaactcgtaaagcagcagaacaggaaaacatcacgcacacgttccaggtattgcttatccttgggtatctggtagtctttcagcttgttcagttcatcccaagtcaggaagattacttttttcgaggtggttttcagtttcggtttgaacgtatcgtatgcaatgttctgatgatgtcctttcttgaagctccagcgcaggaaccatttgaggaatcccatttgcttgccgatggtgctgtttctcatatccttggtgtcacgcaggaagttgacgtattcgttcaatccaaactcgttgaaatagttgaacgttgcatcctccttgaactctttgaggtggttcctcactgctgcaaatttttcataggtggatgccgtccagttattctggttaccgcactcttttacaaactcatcgaacacctcccaaaagctgacaggggcttcttccggctgttcttcactggtatctttcattctcatgttgaaagcttccttcaactgttgggtcgttggcatgacctcctgcacctcaaattccttgaaaatattctggatttcggcatagtatttcagcaagtccgtattgatttcggctgcactttgctttagcttgttggtacatccgttctttacccgctgcttatctgcatcccatttggctacgtcaatccggtagcccgttgtaaactcgatacgttggctggcaaagatgacacgcatacggatgggtacgttctctacgattggcacaccgttctttttccggctctccaatgcaaaaatgatgttgcgcttgatattcataattgggtgcgtttgaaattctacacccaaatatacacccaattattgagatagcaaaagacatttagaaacatttacttttactctatattgtaatttacacttgattatcagtcgtttgcagtcttatgatattctgtgaaagtataagttcgagagcctgtctctccgcaaaaaacgctgaaaatcagcagattgcaaaacaaacaccctgttttacacccaagaatgtaaagtcgggtgtttttgttttatttaagataatacaaccactacataataaaagagtagcgatattaaaagaatccgatgagaaaagactaatatttatctatccattcagtttgatttctcaggactttacatcgtcctgaaagtatttgttgccagtgttacaaccaattaaccaattctgattagaaaaactcatcgagcatcaaatgaaactgcaatttattcatatcaggattatcaataccatatttttgaaaaagccgtttctgtaatgaaggagaaaactcaccgaggcagttccataggatggcaagatcctggtatcggtctgcgattccgactcgtccaacatcaatacaacctattaatttcccctcgtcaaaaataaggttatcaagtgagaaatcaccatgagtgacgactgaatccggtgagaatggcaaaagcttatgcatttctttccagacttgttcaacaggccagccattacgctcgtcatcaaaatcactcgcatcaaccaaaccgttattcattcgtgattgcgcctgagcgaggcgaaatacgcgatcgctgttaaaaggacaattacaaacaggaatcgaatgcaaccggcgcaggaacactgccagcgcatcaacaatattttcacctgaatcaggatattcttctaatacctggaatgctgttttcccggggatcgcagtggtgagtaaccatgcatcatcaggagtacggataaaatgcttgatggtcggaagaggcataaattccgtcagccagtttagtctgaccatctcatctgtaacatcattggcaacgctacctttgccatgtttcagaaacaactctggcgcatcgggcttcccatacaatcgatagattgtcgcacctgattgcccgacattatcgcgagcccatttatacccatataaatcagcatccatgttggaatttaatcgcggcctggagcaagacgtttcccgttgaatatggctcataacaccccttgtattactgtttatgtaagcagacagttttattgttcatgatgatatatttttatcttgtgcaatgtaacatcagagattttgagacacaacgtggctttgttgaataaatcgaacttttgctgagttgaaggatcagccgcgcagttcaacctgttgatagtacgtactaagctctcatgtttcacgtactaagctctcatgtttaacgtactaagctctcatgtttaacgaactaaaccctcatggctaacgtactaagctctcatggctaacgtactaagctctcatgtttcacgtactaagctctcatgtttgaacaataaaattaatataaatcagcaacttaaatagcctctaaggttttaagttttataagaaaaaaaagaatatataaggcttttaaagcttttaaggtttaacggttgtggacaacaagccagggatgtaacgcactgagaagcccttagagcctctcaaagcaattttgagtgacacaggaacacttaacggctgacatggggcggccgctcaacgtaccggtctcagtagggagagctgtatgtgggtag

SEQ ID NO: 59 - protein, 1326 aa, Artificial Sequence
  HTCS-17150-V2
MFRLILSLISVLIIVCKSFASNEFVTRKYTTLDGLSQNDVQCIYQDSKGFIWLATNDGLNRFDGYEFKVYGYQSNGLNSNLIVCIDEDSHGNLWIGTADRGVFLFNSVKNEFVSLNLGHSGIDKNFTCDKILVDSKDRVWFHSSDESIYLVNYDFQNGKINTVLRSTLKLPYISDIIEIDNTIMLSSEDGLYECNVDGDELLLNKLLGCPIASAIVISSSQILYSNLENHQLCLYDKHTCKVSTLLENCDIRKMVYKNKRLFYATTSTVNVLTFDVLHAIESKPQVIATYSYSYPQTVVLDKNDILWIGFFKSGFMSIRENNKPIDLFRGIGNDHISSVYTFAKSDIYLGTEGSGLYHFNSITGNARLIPFTANRIVYSTAYSNYTDCMYVSLMYDGIYSFTSDNDYKKISGLRNVRAMLADGKYLWIGTYNKGLFRYDLSTGVMKEIKTSDNKELKIVRNIIKDHKGNIWVASSFGLKVLESADLYIDNPVLNSVKGLDELDYIVPVCEDLNHNIWYGTLGRGLRKIVDLDENHNACVENFSSADGLSSNTIKSIVNGTDGTLWISTNKGINSLNINTQRIRSYDIFDGLQDYEFMELSAGVMTDGTMIFGGVNGINVFRPNDFDVIDFNGSPTLVDFKIFNHSVEADSTYSAYFDKSVSFTEHIELPYNLNTFSFQFSSLDYRSPYKVGYEYMLEGVDDSWISTSAFHREAFYTKLPSGEYMFRLRVRNSDGVYSLNELSIPVIINPPFWATWYAYTLYFLLFLIGVITFIYLYDRTQKKRYAQKQILADNQREKDIYNAKIEFFTDIAHEIRTPLILINGPLEAILEENEIDPPAIRKNMRIMEQNVKRLLDLINQLLDFRKIDERKFILNPTNTNLNNLVTKTINRFQLTFEQKEKQLTLHITDDVLIANIDQESVIKIISNLINNALKYSNKTIQVDLYATDDNIAHIRVINDGAPIPDNLSKKIFEPFYRTTKVSNIPGSGIGLSLASNLAKLNNAELILDTTASLTTFILSIPISINADEQHTEEKEQEEDSESTTFIEQNTPPTVISDTEEYEELGEDEPKIKENSILIVEDEPEVRSYLSERLEKYFNVYIATNGVEALKVLNEKYINIILSDLMMPEMDGLELCQNVKSNEDLAQIPFVLLTAKTDMDSKMKSLEIGADAYIEKPTAFNYLYKHINMLLKNREKEKKAFLNKPFFPVQKMKVSKNDEKFLNKIIEIINHDLANPELNVKYLADNLYMSRSGLHRKVKQITSLSPIEFIKLIRLKKAAELIQEGEYQIAEVCFMVGINSPSYFGKMFFQQFGMTPKEFAKSNKVGKG

SEQ ID NO: 60 - DNA, 9041 bp, Artificial Sequence
  pWW1333
gtctttttaagaacaatcccaatacagtctgttactgtaatttctttcgggcatcgtatctattattgagtgtaatggtacgatgctttttttgttttatactatgaaatgaagttaaagatttatttttttcttgattgattttgatacgcattctaaagtggaaaatatctataattatctattaactactgtaaatacttgatgttttagataaaatcaataactttgtaatcttgatgaaatataaagaataatagttaaatgtttagattaatcttaagtttaatatcagttctgattatagtttgcaaatcctttgcatccaatgagtttgtcacaagaaagtacactactcttgatggactttcccaaaatgatgtgcaatgtatttatcaagactcaaaaggctttatatggttggccacgaacgacggactgaacaggtttgacggatatgaatttaaggtttacggatatcagtcaaacggtcttaacagtaatctgatagtatgtattgacgaagattcacatggaaatctgtggataggtacagccgatagaggagtgttcctgttcaattctgtaaagaacgaattcgtttcattaaatcttggtcacagcggtattgataaaaatttcacttgcgataagattcttgtcgactctaaagacagagtctggtttcattcctctgatgaaagtatataccttgtaaattatgattttcaaaatggcaaaataaatactgtcttaagatcaacattaaaattaccatacatttccgacatcatagaaatagataatacgataatgctctcctccgaagacggcctgtacgaatgtaacgtcgatggagatgaattactgcttaacaaactattgggatgccctatagcttcagccatagtcatctcatcttctcaaatattgtactcaaatctggaaaatcatcaattatgtttatacgacaagcatacctgcaaggtaagtaccctgttggaaaactgtgatatacgaaaaatggtatataaaaacaaaagattattttatgccactacaagcactgtgaatgtgttgacttttgatgtattgcatgccatcgagtcaaaaccacaggttattgctacatattcttacagctatccgcaaactgtagttcttgataaaaacgatattctttggataggatttttcaagagtggctttatgagtatacgcgaaaataataaacctatagatttattcagaggaataggaaatgatcatatatcgtccgtttatacatttgccaaatctgatatatatttaggcacagaaggctcagggctatatcattttaattccattaccggtaatgccagacttattcctttcacggcaaacaggatagtatactcaacagcatactcaaactacaccgactgcatgtatgtgtctctgatgtacgatggtatttacagtttcacttctgataatgattataaaaagatctcaggtttgagaaatgtgcgcgcaatgcttgccgatggaaaatatttgtggattggcacatataataaaggtcttttcagatatgatttgtccacaggtgtgatgaaggaaatcaaaacatctgacaataaagaacttaagatagtaagaaacatcattaaagatcataagggtaatatatgggtagcttccagcttcggtcttaaagtattggaatctgcagatttgtatatagataatcctgttttgaactcagtcaagggacttgatgaactcgactatatagtgcctgtatgtgaagacttgaatcataatatctggtatggaacacttggacgtgggttaaggaaaatcgtggatttggatgaaaaccataatgcctgcgttgaaaattttagctctgcagacgggttgagcagcaatacaataaaatcaattgttaatggcacggatggaacattatggatttctaccaataaaggaattaattcgttgaatatcaacacacagagaataagatcttatgatattttcgatggtcttcaggattatgaatttatggaactttctgctggagtaatgacggatggaacaatgatattcggtggcgtaaacggaattaacgtctttagacctaatgactttgatgtgatagatttcaacggtagtcctacactcgttgattttaaaatcttcaatcacagcgttgaggcagattccacatattcagcttatttcgacaaaagtgtaagttttacagagcacattgaattgccttataatttaaacactttctcattccagttcagctccctggattacagaagtccttataaggttggttacgaatatatgctcgaaggcgtagatgattcatggatttccacctccgcttttcatcgtgaggctttctacacaaagcttccttcaggcgaatatatgttcagactgagggtcaggaatagcgatggagtctacagtttgaatgaactttccatacctgtcattattaaccctcctttctgggcgacttggtatgcctatacactctattttctcctgtttctgattggcgtcatcacattcatttatctgtatgaccgtactcaaaaaaaacgctacgctcaaaaacagattttagcggacaatcagcgcgagaaagacatttataacgcaaagattgagtttttcactgatattgcccacgaaatccgcaccccactcattctgattaacggaccgctggaagctattttagaagagaacgaaattgatccgccggcgattcgtaagaacatgcgcatcatggaacagaacgttaagcgcctgctggatctgatcaatcagctgctcgatttcaggaaaatcgatgaacgcaagttcattttaaatccaacaaacaccaatctgaataatcttgtcacaaagactattaaccgttttcaattgacatttgagcagaaagagaaacaactcacactgcatatcaccgatgatgtcttgattgcgaacatcgatcaagaatctgttatcaaaatcatttcaaatctgattaataacgcacttaaatattctaacaaaaccattcaggttgatctctacgccacagacgataatatcgcccacatccgtgtgatcaatgatggggccccgatccctgataacctgtcgaaaaagatttttgaaccgttctatcgtacaaccaaagttagcaacatcccgggttctggtattggtctttcacttgcgtcgaacctggcgaagttgaataacgccgaacttattctggacacgacggcgagcctcactacattcatactgagcattccgatttcgattaacgcggatgaacagcataccgaagaaaaggaacaggaggaagattctgagagcacaaccttcattgagcagaataccccgcccaccgttatttctgacactgaagagtatgaagaactcggtgaggatgaaccgaaaatcaaggaaaacagcatactgatcgtggaagatgaaccagaggtccgcagctacttgtctgagcgccttgaaaaatacttcaatgtttacattgcgacaaatggtgtggaggcccttaaggtgctgaacgaaaagtacatcaacattatcctgtctgatttaatgatgcctgaaatggatggcctggaactgtgccagaacgtcaaatccaacgaggacctcgcgcagatcccgtttgttctgctaactgctaaaaccgatatggactctaagatgaaatcactggagatcggcgcggatgcgtacatcgaaaaaccgactgcttttaactacttatacaaacatatcaatatgctgttgaagaaccgcgaaaaggagaaaaaagcctttctgaataaaccgtttttccccgtccaaaaaatgaaagtgtcgaaaaatgatgagaaattcttgaacaaaatcatcgagattattaaccatgatctcgcaaaccccgagctcaatgtgaaatatctggcggacaatctgtatatgtcccgctcaggtctgcatcgtaaagtcaagcagattacaagtctctctccgatcgagtttataaagctgattcgtctgaagaaggcagcagagctcatccaggaaggcgaataccagattgctgaagtctgcttcatggttggcatcaactcaccaagctactttggtaaaatgtttttccagcagtttggtatgaccccgaaagaatttgcgaaatccaataaagttggtaaagggtaatgcgaaggccatcctgacggatggccttttttttgacttgagaccggctattacgagcgcttaaacggcgcgcctgataggtgggctgcccttcctggttggcttggtttcatcagccatccgcttgccctcatctgttacgccggcggtagccggccagcctcgcagagcaggattcccgttgagcaccgccaggtgcgaataagggacagtgaagaaggaacacccgctcgcgggtgggcctacttcacctatcctgcccggctgacgccgttggatacaccaaggaaagtctacacgaaccctttggcaaaatcctgtatatcgtgcgaaaaaggatggatataccgaaaaaatcgctataatgaccccgaagcagggttatgcagcggaaaagcgggattaaaagtcggggattggtgaacaaaaaggtgtttctctctttaagagaaatatcgttttgctaaacagttgatattgaggtatcattttatcgtaaaagacatttttgctcaacaattgcttgacggaaatcaacaaattttagcattttgtaaaaaagtcgctatataatttggtgaattggagttattttcatatttttgcatcccgaagagtttctcttaaagagagaaacatcttttgcataccttttccgaccgaatttttatgtcgtaaagaggggctttgcagggggtggactcagaaagatgagaatagatgactattgtagttgaaacacatagaaagttgctgatatacagaccgatacgcatatcgggatgaaccatgagtacgttcttttctcaaaaaacataaatattcgaaaagagatgcaataaattaaggagaggttataatgaacaaagtaaatataaaagatagtcaaaattttattacttcaaaatatcacatagaaaaaataatgaattgcataagtttagatgaaaaagataacatctttgaaataggtgcagggaaaggtcattttactgctggattggtaaagagatgtaattttgtaacggcgatagaaattgattctaaattatgtgaggtaactcgtaataagctcttaaattatcctaactatcaaatagtaaatgatgatatactgaaatttacatttcctagccacaatccatataaaatatttggcagcataccttacaacataagcacaaatataattcgaaaaattgtttttgaaagttcagccacaataagttatttaatagtggaatatggttttgctaaaatgttattagatacaaacagatcactagcattgctgttaatggcagaggtagatatttctatattagcaaaaattcctaggtattatttccatccaaaacctaaagtggatagcacattaattgtattaaaaagaaagccagcaaaaatggcatttaaagagagaaaaaaatatgaaacttttgtaatgaaatgggttaacaaagagtacgaaaaactgtttacaaaaaatcaatttaataaagctttaaaacatgcgagaatatatgatataaacaatattagtttcgaacaatttgtatcgctatttaatagttataaaatatttaacggctaaaaacaataggccacatgcaactgtaaatgtttacgcgggtaccgacaccgcggtggaggggaattacgagtcattggtaactatctatgaaactgtttgatacttttatagttgattaaacttgttcatggcatttgccttaatatcatccgctatgtcaatgtagggtttcatagctttgtagtcgctgtgtcccgtccatttcatgaccacctgtgccgggattccgagagccagcgcattgcagatgaatgtcctttttcctgcatgggtactgagcaaagcgtatttgggtgtgacttcatcaatacgttcatttcccttgtagtaggtttcccgtacaggctcgttgatttctgccagttcgcccagctctttcaggtaatcgttcatcttctggttgctgatgacgggcagagccatgtaattctcgaaatggatgtccttgtatttgtccagtatggctttgctgtatttgttcagttcaatcgtcaggctgtcggcagtcttgactgtggttatttcgatgtggtcggacttcacatcgcttcttttcagattgcgaacatccgaataccgcaaactcgtaaagcagcagaacaggaaaacatcacgcacacgttccaggtattgcttatccttgggtatctggtagtctttcagcttgttcagttcatcccaagtcaggaagattacttttttcgaggtggttttcagtttcggtttgaacgtatcgtatgcaatgttctgatgatgtcctttcttgaagctccagcgcaggaaccatttgaggaatcccatttgcttgccgatggtgctgtttctcatatccttggtgtcacgcaggaagttgacgtattcgttcaatccaaactcgttgaaatagttgaacgttgcatcctccttgaactctttgaggtggttcctcactgctgcaaatttttcataggtggatgccgtccagttattctggttaccgcactcttttacaaactcatcgaacacctcccaaaagctgacaggggcttcttccggctgttcttcactggtatctttcattctcatgttgaaagcttccttcaactgttgggtcgttggcatgacctcctgcacctcaaattccttgaaaatattctggatttcggcatagtatttcagcaagtccgtattgatttcggctgcactttgctttagcttgttggtacatccgttctttacccgctgcttatctgcatcccatttggctacgtcaatccggtagcccgttgtaaactcgatacgttggctggcaaagatgacacgcatacggatgggtacgttctctacgattggcacaccgttctttttccggctctccaatgcaaaaatgatgttgcgcttgatattcataattgggtgcgtttgaaattctacacccaaatatacacccaattattgagatagcaaaagacatttagaaacatttacttttactctatattgtaatttacacttgattatcagtcgtttgcagtcttatgatattctgtgaaagtataagttcgagagcctgtctctccgcaaaaaacgctgaaaatcagcagattgcaaaacaaacaccctgttttacacccaagaatgtaaagtcgggtgtttttgttttatttaagataatacaaccactacataataaaagagtagcgatattaaaagaatccgatgagaaaagactaatatttatctatccattcagtttgatttctcaggactttacatcgtcctgaaagtatttgttgccagtgttacaaccaattaaccaattctgattagaaaaactcatcgagcatcaaatgaaactgcaatttattcatatcaggattatcaataccatatttttgaaaaagccgtttctgtaatgaaggagaaaactcaccgaggcagttccataggatggcaagatcctggtatcggtctgcgattccgactcgtccaacatcaatacaacctattaatttcccctcgtcaaaaataaggttatcaagtgagaaatcaccatgagtgacgactgaatccggtgagaatggcaaaagcttatgcatttctttccagacttgttcaacaggccagccattacgctcgtcatcaaaatcactcgcatcaaccaaaccgttattcattcgtgattgcgcctgagcgaggcgaaatacgcgatcgctgttaaaaggacaattacaaacaggaatcgaatgcaaccggcgcaggaacactgccagcgcatcaacaatattttcacctgaatcaggatattcttctaatacctggaatgctgttttcccggggatcgcagtggtgagtaaccatgcatcatcaggagtacggataaaatgcttgatggtcggaagaggcataaattccgtcagccagtttagtctgaccatctcatctgtaacatcattggcaacgctacctttgccatgtttcagaaacaactctggcgcatcgggcttcccatacaatcgatagattgtcgcacctgattgcccgacattatcgcgagcccatttatacccatataaatcagcatccatgttggaatttaatcgcggcctggagcaagacgtttcccgttgaatatggctcataacaccccttgtattactgtttatgtaagcagacagttttattgttcatgatgatatatttttatcttgtgcaatgtaacatcagagattttgagacacaacgtggctttgttgaataaatcgaacttttgctgagttgaaggatcagccgcgcagttcaacctgttgatagtacgtactaagctctcatgtttcacgtactaagctctcatgtttaacgtactaagctctcatgtttaacgaactaaaccctcatggctaacgtactaagctctcatggctaacgtactaagctctcatgtttcacgtactaagctctcatgtttgaacaataaaattaatataaatcagcaacttaaatagcctctaaggttttaagttttataagaaaaaaaagaatatataaggcttttaaagcttttaaggtttaacggttgtggacaacaagccagggatgtaacgcactgagaagcccttagagcctctcaaagcaattttgagtgacacaggaacacttaacggctgacatggggcggccgctcaacgtaccggtctcagtagggagagctgtatgtgggtag

SEQ ID NO: 61 - DNA, 12565 bp, Artificial Sequence
  pZR3007 - lytB biocontainment plasmid
aaaaaaaaggccatccgtcaggatggccttcgcattaccctttaccaactttattggatttcgcaaattctttcggggtcataccaaactgctggaaaaacattttaccaaagtagcttggtgagttgatgccaaccatgaagcagacttcagcaatctggtattcgccttcctggatgagctctgctgccttcttcagacgaatcagctttataaactcgatcggagagagacttgtaatctgcttgactttacgatgcagacctgagcgggacatatacagattgtccgccagatatttcacattgagctcggggtttgcgagatcatggttaataatctcgatgattttgttcaagaatttctcatcatttttcgacactttcattttttggacggggaaaaacggtttattcagaaaggcttttttctccttttcgcggttcttcaacagcatattgatatgtttgtataagtagttaaaagcagtcggtttttcgatgtacgcatccgcgccgatctccagtgatttcatcttagagtccatatcggttttagcagttagcagaacaaacgggatctgcgcgaggtcctcgttggatttgacgttctggcacagttccaggccatccatttcaggcatcattaaatcagacaggataatgttgatgtacttttcgttcagcaccttaagggcctccacaccatttgtcgcaatgtaaacattgaagtatttttcaaggcgctcagacaagtagctgcggacctctggttcatcttccacgatcagtatgctgttttccttgattttcggttcatcctcaccgagttcttcatactcttcagtgtcagaaataacggtgggcggggtattctgctcaatgaaggttgtgctctcagaatcttcctcctgttccttttcttcggtatgctgttcatccgcgttaatcgaaatcggaatgctcagtatgaatgtagtgaggctcgccgtcgtgtccagaataagttcggcgttattcaacttcgccaggttcgacgcaagtgaaagaccaataccagaacccgggatgttgctaactttggttgtacgatagaacggttcaaaaatctttttcgacaggttatcagggatcggggccccatcattgatcacacggatgtgggcgatattatcgtctgtggcgtagagatcaacctgaatggttttgttagaatatttaagtgcgttattaatcagatttgaaatgattttgataacagattcttgatcgatgttcgcaatcaagacatcatcggtgatatgcagtgtgagttgtttctctttctgctcaaatgtcaattgaaaacggttaatagtctttgtgacaagattattcagattggtgtttgttggatttaaaatgaacttgcgttcatcgattttcctgaaatcgagcagctgattgatcagatccagcaggcgcttaacgttctgttccatgatgcgcatgttcttacgaatcgccggcggatcaatttcgttctcttctaaaatagcttccagcggtccgttaatcagaatgagtggggtgcggatttcgtgggcaatatcagtgaaaaactcaatctttgcgttataaatgtctttctcgcgctgattgtccgctaaaatctgtttttgagcgtagcgttttttttgagtacggtcatacagataaatgaatgtgatgacgccaatcagaaacaggagaaaatagagtgtataggcataccaagtcgcccagaaaggagggttaataatgacaggtatggaaagttcattcaaactgtagactccatcgctattcctgaccctcagtctgaacatatattcgcctgaaggaagctttgtgtagaaagcctcacgatgaaaagcggaggtggaaatccatgaatcatctacgccttcgagcatatattcgtaaccaaccttataaggacttctgtaatccagggagctgaactggaatgagaaagtgtttaaattataaggcaattcaatgtgctctgtaaaacttacacttttgtcgaaataagctgaatatgtggaatctgcctcaacgctgtgattgaagattttaaaatcaacgagtgtaggactaccgttgaaatctatcacatcaaagtcattaggtctaaagacgttaattccgtttacgccaccgaatatcattgttccatccgtcattactccagcagaaagttccataaattcataatcctgaagaccatcgaaaatatcataagatcttattctctgtgtgttgatattcaacgaattaattcctttattggtagaaatccataatgttccatccgtgccattaacaattgattttattgtattgctgctcaacccgtctgcagagctaaaattttcaacgcaggcattatggttttcatccaaatccacgattttccttaacccacgtccaagtgttccataccagatattatgattcaagtcttcacatacaggcactatatagtcgagttcatcaagtcccttgactgagttcaaaacaggattatctatatacaaatctgcagattccaatactttaagaccgaagctggaagctacccatatattacccttatgatctttaatgatgtttcttactatcttaagttctttattgtcagatgttttgatttccttcatcacacctgtggacaaatcatatctgaaaagacctttattatatgtgccaatccacaaatattttccatcggcaagcattgcgcgcacatttctcaaacctgagatctttttataatcattatcagaagtgaaactgtaaataccatcgtacatcagagacacatacatgcagtcggtgtagtttgagtatgctgttgagtatactatcctgtttgccgtgaaaggaataagtctggcattaccggtaatggaattaaaatgatatagccctgagccttctgtgcctaaatatatatcagatttggcaaatgtataaacggacgatatatgatcatttcctattcctctgaataaatctataggtttattattttcgcgtatactcataaagccactcttgaaaaatcctatccaaagaatatcgtttttatcaagaactacagtttgcggatagctgtaagaatatgtagcaataacctgtggttttgactcgatggcatgcaatacatcaaaagtcaacacattcacagtgcttgtagtggcataaaataatcttttgtttttatataccatttttcgtatatcacagttttccaacagggtacttaccttgcaggtatgcttgtcgtataaacataattgatgattttccagatttgagtacaatatttgagaagatgagatgactatggctgaagctatagggcatcccaatagtttgttaagcagtaattcatctccatcgacgttacattcgtacaggccgtcttcggaggagagcattatcgtattatctatttctatgatgtcggaaatgtatggtaattttaatgttgatcttaagacagtatttattttgccattttgaaaatcataatttacaaggtatatactttcatcagaggaatgaaaccagactctgtctttagagtcgacaagaatcttatcgcaagtgaaatttttatcaataccgctgtgaccaagatttaatgaaacgaattcgttctttacagaattgaacaggaacactcctctatcggctgtacctatccacagatttccatgtgaatcttcgtcaatacatactatcagattactgttaagaccgtttgactgatatccgtaaaccttaaattcatatccgtcaaacctgttcagtccgtcgttcgtggccaaccatataaagccttttgagtcttgataaatacattgcacatcattttgggaaagtccatcaagagtagtgtactttcttgtgacaaactcattggatgcaaaggatttgcaaactataatcagaactgatattaaacttaagattaatctaaacatttaactattattctttatatttcatcaagattacaaagttattgattttatctaaaacatcaagtatttacagtagttaatagataattatagatattttccactttagaatgcgtatcaaaatcaatcaagaaaaaaataaatctttaacttcatttcatagtataaaacaaaaaaagcatcgtaccattacactcaataatagatacgatgcccgaaagaaattacagtaacagactgtattgggattgttcttaaaaagacaagaaaacgcgcaaaaagccgcctaatggcggctttttgcgcgttttttttagaaaagtatagtttgttataaaacagtgaatgagccacagtggatataacttatctgttgtggctcatttaccgttttatattaacctttaaaaacaaagtaaattgtatttaacggatatctacatcaggcttatttttgataatagaacaagctgctttatgtctttattcctattttcttttttcgctacaacaaactcaaaccagtttaattatcttttatacctattgtcaatcttatagactttcatttcatttctctacggagatcgcctcgatcctctacgagaaacgggtcgattctctacgacaatcgaggcgtttctcgtagaggaaaaagcagacatcataacacattgatttacagaatattacacaaacataaatctgtataatattttcaacacaccaatttctacttcacctctccttttgagtcatctcactttctgaaatagctacaattatgagattatgctgaatgtaactcctatcatatagctattgtcagcagtatgattcagcactgcaaagaaaatcaccaatataaacgacatgaaactaaggtgtactctgtatactaccaaagcgtgccgccctacatacagactctatagatcgtacagagatatttatattagctaatttcatattccatacccattgaaacattactctaaaatcattttattcctattttacataagaacttcgcatttcaagcacaagacagaatacaacaaaactctcacctaatagcacaaatgtagaaaatggactacaaaccactcaaacgccgaaaatttctacatttattatagttatcgatacatttaacgacagccttaataaaccattacgctacatttgtgcattcagtttttaaaactattaaccaatttaaaagtaaagattcctggcatcctggaagcattaaattttaaaaaatgaaaaaaataactattgccattgacggttattcatcatgtggaaaaagcacgatggccaaagacttggcacgtgaaataggatacatttatattgatagcggtgccatgtatcgtgctgttacattatatagcctgcagaaagggttctttacggaaagaggcatcgacaccgaagcgttaaaaacagcgatgcccgatatacatatttcattccggttaaatccggagacacaacgccccatgactttcctgaacgatacaaatgtagaggatgccatccgcagcatggaagtttcctctcatgtaagccctatcgccgccttgggttttgtacgtgaggctttggtgaaacaacaacaggaaatgggaaaggccaaaggaattgtcatggacggaagggacattggaaccgttgttttccccgatgccgaactgaaaatatttgtaaccgcctcggctgccatacgtgcacagcgccgttatgatgaattaagaagtaaagggcaagaggcctcttatgaaaaaattctggaaaatgtggaagagcgtgaccgtatagaccaaacccgtgaagtcagcccgttacggcaagcggatgacgctatcttgttggacaacagccacatgagcattgccgaacagaaaaagtggctgaccgaaaaatttcaagcagcgataaatggttaacatagagatagacgaaggatctgggttctgcttcggagtcaccacagctatccgtaaagcagaagaagaactggcaaaaggaaacactctttattgtctgggagacattgtacacaacggacaggaatgtgaacgcctaaaaaaaatggggcttatcacaataaaccacgaagagtttgcccaattacacgatgccaaagtactgttgcgcgcacatggagaacctcctgaaacatacgctatagcccgtaccaacaacatcgagatcattgacgccacctgtccggtagtattacgcctccaaaagcgcatcaaacaggagtatgacaatgttccggcaagtcaagacacacaaatcgtgatttatggcaagaacggtcatgccgaagtactggggctggtaggtcaaactcatggaaaagcaattgtcatagaaacacctgctgaagctgctcatctggacttcaccaaagacatacgcttgtactcccagacaaccaagtctttggaagaattctggcaaatcatagaatatatcaaggagcatatctcacccgatgccacttttgaatattacgacacaatctgccggcaagtggccaaccggatgcctaacatccgcaaatttgcagcagcgcatgatctgatcttttttgtctgcggacgaaaaagctcaaacggaaagatcttatatcaagaatgcaaaaagatcaatccgaattcatacctcattgaccagccggaagaaatagaccggaacttgctcgaggacgtccgttccatcggcatttgtggagcgacttccacccccaaaaacggcgcgcctgataggtgggctgcccttcctggttggcttggtttcatcagccatccgcttgccctcatctgttacgccggcggtagccggccagcctcgcagagcaggattcccgttgagcaccgccaggtgcgaataagggacagtgaagaaggaacacccgctcgcgggtgggcctacttcacctatcctgcccggctgacgccgttggatacaccaaggaaagtctacacgaaccctttggcaaaatcctgtatatcgtgcgaaaaaggatggatataccgaaaaaatcgctataatgaccccgaagcagggttatgcagcggaaaagcgggattaaaagtcggggattggtgaacaaaaaggtgtttctctctttaagagaaatatcgttttgctaaacagttgatattgaggtatcattttatcgtaaaagacatttttgctcaacaattgcttgacggaaatcaacaaattttagcattttgtaaaaaagtcgctatataatttggtgaattggagttattttcatatttttgcatcccgaagagtttctcttaaagagagaaacatcttttgcataccttttccgaccgaatttttatgtcgtaaagaggggctttgcagggggtggactcagaaagatgagaatagatgactattgtagttgaaacacatagaaagttgctgatatacagaccgatacgcatatcgggatgaaccatgagtacgttcttttctcaaaaaacataaatattcgaaaagagatgcaataaattaaggagaggttataatgaacaaagtaaatataaaagatagtcaaaattttattacttcaaaatatcacatagaaaaaataatgaattgcataagtttagatgaaaaagataacatctttgaaataggtgcagggaaaggtcattttactgctggattggtaaagagatgtaattttgtaacggcgatagaaattgattctaaattatgtgaggtaactcgtaataagctcttaaattatcctaactatcaaatagtaaatgatgatatactgaaatttacatttcctagccacaatccatataaaatatttggcagcataccttacaacataagcacaaatataattcgaaaaattgtttttgaaagttcagccacaataagttatttaatagtggaatatggttttgctaaaatgttattagatacaaacagatcactagcattgctgttaatggcagaggtagatatttctatattagcaaaaattcctaggtattatttccatccaaaacctaaagtggatagcacattaattgtattaaaaagaaagccagcaaaaatggcatttaaagagagaaaaaaatatgaaacttttgtaatgaaatgggttaacaaagagtacgaaaaactgtttacaaaaaatcaatttaataaagctttaaaacatgcgagaatatatgatataaacaatattagtttcgaacaatttgtatcgctatttaatagttataaaatatttaacggctaaaaacaataggccacatgcaactgtaaatgtttacgcgggtaccgacaccgcggtggaggggaattgtgttacaaccaattaaccaattctgattagaaaaactcatcgagcatcaaatgaaactgcaatttattcatatcaggattatcaataccatatttttgaaaaagccgtttctgtaatgaaggagaaaactcaccgaggcagttccataggatggcaagatcctggtatcggtctgcgattccgactcgtccaacatcaatacaacctattaatttcccctcgtcaaaaataaggttatcaagtgagaaatcaccatgagtgacgactgaatccggtgagaatggcaaaagcttatgcatttctttccagacttgttcaacaggccagccattacgctcgtcatcaaaatcactcgcatcaaccaaaccgttattcattcgtgattgcgcctgagcgaggcgaaatacgcgatcgctgttaaaaggacaattacaaacaggaatcgaatgcaaccggcgcaggaacactgccagcgcatcaacaatattttcacctgaatcaggatattcttctaatacctggaatgctgttttcccggggatcgcagtggtgagtaaccatgcatcatcaggagtacggataaaatgcttgatggtcggaagaggcataaattccgtcagccagtttagtctgaccatctcatctgtaacatcattggcaacgctacctttgccatgtttcagaaacaactctggcgcatcgggcttcccatacaatcgatagattgtcgcacctgattgcccgacattatcgcgagcccatttatacccatataaatcagcatccatgttggaatttaatcgcggcctggagcaagacgtttcccgttgaatatggctcataacaccccttgtattactgtttatgtaagcagacagttttattgttcatgatgatatatttttatcttgtgcaatgtaacatcagagattttgagacacaacgtggctttgttgaataaatcgaacttttgctgagttgaaggatcagcaaaaaaacacccgttagggtgttttttcgaaaaaaaagggggaaactccccctttcgcattaatatgccgcttcgaattcttttaggaagcgtgtatcgttttcagagaacatacggaggtctttcacctgatatttcaggtttgtgatacgctcgatacccataccgagtccataaccgctgtatattttgctgtctataccatttgattcaagtacgttcgggtctaccataccgcaaccgaggatttctacccagccggtgtgtttacagaacggacatcctttaccgccgcagatattacagctgatatccatttccgcacttggttcagcaaacgggaagtaagacggacgcagacggatctttgtatcagcaccgaacatttctttggcaaagagcagcaatacctgcttcaagtcggtgaatgatacgtttttatctacatacagcgcttctacctgatggaagaaacagtgtgcgcgatagctgatagcttcgttacgatatacacgtcccggacagatgatgcggataggaggctgtgaagtttccatcacacgagtctgtacagaagaagtatgtgtacgcaatactacgtccgggtgagcttcgataaagaaagtgtcctgcatatcgcgtgccggatgatcttcggcaaagttcagtgccgagaacacgtgccagtcatcttcaatttccggaccttcggcaatgctgaatcccagacgggcaaagatatcaatgatttcgttctttacaatggtgagcgggtggcgtgtaccgagttctacaggataagccgaacgcgtcaaatccagtccgtcacaatcgttgtcctgactttcaaacatttctttcagcgcgttgattttgtcctgcgcttttgttttcagttcattcagtctcatgccgacttcttttttctgttcggcagctacattacggaaatctgccattaagtcgttaatggctcccttcttacttaggtatttgatgcggagagcttcgagttcttcggcattggaggcgtgtaaggcttccacctctttcagaagttgttcaatcttagctatcattttcttatatttttttggttggtgatgccaggctactttgtttctttcgacactgcaaatataagaacattatttgaaagttcaagtgaaactttaaattttaacaatagattaaccattgcaaacaaaacaaaaaaaaggtagcccaattgtaaaacgaaaggcccagtctttcgactgagcctttcgttttatcctaggatcagctgtacgtactcgcagttcaacctgttgatagtacgtactaagctctcatgtttcacgtactaagctctcatgtttaacgtactaagctctcatgtttaacgaactaaaccctcatggctaacgtactaagctctcatggctaacgtactaagctctcatgtttcacgtactaagctctcatgtttgaacaataaaattaatataaatcagcaacttaaatagcctctaaggttttaagttttataagaaaaaaaagaatatataaggcttttaaagcttttaaggtttaacggttgtggacaacaagccagggatgtaacgcactgagaagcccttagagcctctcaaagcaattttgagtgacacaggaacacttaacggctgacatggggcggccgcacgaatcatcctgtaactggaatgccaatcccattttgataccgaaatcgtataatttgcgggcatcatcttccgaagccccccctaatacagcaccaatttttaacgcagcagacaaaagtaccgatgtctttaaacgaatcatctccatatattcgggaacagtaacatcattccgggtttcaaattccatatcccactgctgtccttcacaaatttccaaagcagtctgactgaaaatatccatcacttgcctcaaataacgctccggacaattattcatcagccgataagccaacaccagcatggcatcccccgaaagaatagccgtattctcatcccaaaccttatgcacggtaggcttgtttctgcgcatatccgcacaatccatcaaatcatcatgcaacaatgtataattatgataagtctctatacctgccgcttgtggtaaaatatcatccacattctctttgtaaagctgataggaaagcaacatcaaaacaggacggatacgtttaccgcctaatgacaagacatactctataggagcatacaatccttttggttcgcgcacataaggcatcgtagcaagataagtatttaccttttccaataactggtctgcagaaaaagccataaattattttgattaaggggttctagaaaaagaggctgctttttaaaggcagcctcttaattaagatattaaagtattttattactgtaatttgaaagttacaggcactgtatatttcacacgtacagctttaccacgctgtttgccaggtttccatttcggcatggtcttgattacacggagtgcttccttatccaagtaggggtctacactacgcacaactaccgggtcaacgatagaaccgtccttattaacgacaaactgaacgataaccttaccttgcacaccgttttcctgagaaatagtggggtatttaatattcttacccaagaacttcaaacattcagccatacctccggggaattcaggcatttcctctacaacttggaatatctgctgttcttcaggttcttcttcttccacttctaccggaacatatttaacttccacagcctgacctgtttcttcagaagcctgaatggcagtttcttctactttagcatcgttttcaacgatctgaagcacttcttctaccttaggagcttcgggaggaggaggagcttgtttttgttcctgttccgtaatagggataatttcttcttcaaatacgacatcggttatacctgtttccgtagtcacttgcttgtcgcgatcagtccattcgaaagctacaaacatgagagcaaggataaacacataaccgataagcagccaggtactctttttaccttcgagatctgctttaggcgattttttaacttccataaattgtgttttaaaattaagtgtttctcactgagggcaaatgtaacacaaatcttttaaataaaaagtattttcacatgaaaaatatgctaattcattttagtag

SEQ ID NO: 62 - DNA, 121 bp, Artificial Sequence
  HTCS-17106 responsive promoter
atattgttatgctaaatctttatttcagatattattgcgctgtatactcgtttgctaaataaacatactttaaagtattgaatggttcttatatttgtgcctcaattaatcgtattactaa

SEQ ID NO: 63 - DNA, 140 bp, Artificial Sequence
  HTCS-10809 responsive promoter
aataatcttagtttagtggggttgaatttcagaaaaataaatagttaaaacaatattcttctataaaaaaataagattattacatccccaaaatgatcttttccattactttgcccacaccaaaagggaacaaatcgtta

SEQ ID NO: 64 - protein, 1326 aa, Artificial Sequence
  HTCS-17150-V3
MFRLILSLISVLIIVCKSFASNEFVTRKYTTLDGLSQNDVQCIYQDSKGFIWLATNDGLNRFDGYEFKVYGYQSNGLNSNLIVCIDEDSHGNLWIGTADRGVFLFNSVKNEFVSLNLGHSGIDKNFTCDKILVDSKDRVWFHSSDESIYLVNYDFQNGKINTVLRSTLKLPYISDIIEIDNTIMLSSEDGLYECNVDGDELLLNKLLGCPIASAIVISSSQILYSNLENHQLCLYDKHTCKVSTLLENCDIRKMVYKNKRLFYATTSTVNVLTFDVLHAIESKPQVIATYSYSYPQTVVLDKNDILWIGFFKSGFMSIRENNKPIDLFRGIGNDHISSVYTFAKSDIYLGTEGSGLYHFNSITGNARLIPFTANRIVYSTAYSNYTDCMYVSLMYDGIYSFTSDNDYKKISGLRNVRAMLADGKYLWIGTYNKGLFRYDLSTGVMKEIKTSDNKELKIVRNIIKDHKGNIWVASSFGLKVLESADLYIDNPVLNSVKGLDELDYIVPVCEDLNHNIWYGTLGRGLRKIVDLDENHNACVENFSSADGLSSNTIKSIVNGTDGTLWISTNKGINSLNINTQRIRSYDIFDGLQDYEFMELSAGVMTDGTMIFGGVNGINVFRPNDFDVIDFNGSPTLVDFKIFNHSVEADSTYSAYFDKSVSFTEHIELPYNLNTFSFQFSSLDYRSPYKVGYEYMLEGVDDSWISTSAFHREAFYTKLPSGEYMFRLRVRNSDGVYSLNELSIPVIINPPFWQTWYATYCYILLFLIGVIIFIKAYDRTQKKRYAQKQILADNQREKDIYNAKIEFFTDIAHEIRTPLILINGPLEAILEENEIDPPAIRKNMRIMEQNVKRLLDLINQLLDFRKIDERKFILNPTNTNLNNLVTKTINRFQLTFEQKEKQLTLHITDDVLIANIDQESVIKIISNLINNALKYSNKTIQVDLYATDDNIAHIRVINDGAPIPDNLSKKIFEPFYRTTKVSNIPGSGIGLSLASNLAKLNNAELILDTTASLTTFILSIPISINADEQHTEEKEQEEDSESTTFIEQNTPPTVISDTEEYEELGEDEPKIKENSILIVEDEPEVRSYLSERLEKYFNVYIATNGVEALKVLNEKYINIILSDLMMPEMDGLELCQNVKSNEDLAQIPFVLLTAKTDMDSKMKSLEIGADAYIEKPTAFNYLYKHINMLLKNREKEKKAFLNKPFFPVQKMKVSKNDEKFLNKIIEIINHDLANPELNVKYLADNLYMSRSGLHRKVKQITSLSPIEFIKLIRLKKAAELIQEGEYQIAEVCFMVGINSPSYFGKMFFQQFGMTPKEFAKSNKVGKG

SEQ ID NO: 65 - protein, 1326 aa, Artificial Sequence
  HTCS-17150-V4
MFRLILSLISVLIIVCKSFASNEFVTRKYTTLDGLSQNDVQCIYQDSKGFIWLATNDGLNRFDGYEFKVYGYQSNGLNSNLIVCIDEDSHGNLWIGTADRGVFLFNSVKNEFVSLNLGHSGIDKNFTCDKILVDSKDRVWFHSSDESIYLVNYDFQNGKINTVLRSTLKLPYISDIIEIDNTIMLSSEDGLYECNVDGDELLLNKLLGCPIASAIVISSSQILYSNLENHQLCLYDKHTCKVSTLLENCDIRKMVYKNKRLFYATTSTVNVLTFDVLHAIESKPQVIATYSYSYPQTVVLDKNDILWIGFFKSGFMSIRENNKPIDLFRGIGNDHISSVYTFAKSDIYLGTEGSGLYHFNSITGNARLIPFTANRIVYSTAYSNYTDCMYVSLMYDGIYSFTSDNDYKKISGLRNVRAMLADGKYLWIGTYNKGLFRYDLSTGVMKEIKTSDNKELKIVRNIIKDHKGNIWVASSFGLKVLESADLYIDNPVLNSVKGLDELDYIVPVCEDLNHNIWYGTLGRGLRKIVDLDENHNACVENFSSADGLSSNTIKSIVNGTDGTLWISTNKGINSLNINTQRIRSYDIFDGLQDYEFMELSAGVMTDGTMIFGGVNGINVFRPNDFDVIDFNGSPTLVDFKIFNHSVEADSTYSAYFDKSVSFTEHIELPYNLNTFSFQFSSLDYRSPYKVGYEYMLEGVDDSWISTSAFHREAFYTKLPSGEYMFRLRVRNSDGVYSLNELSIPVIINPPFWRSWYAYTLYILLFLIGVIIFKYAYDRTQKKRYAQKQILADNQREKDIYNAKIEFFTDIAHEIRTPLILINGPLEAILEENEIDPPAIRKNMRIMEQNVKRLLDLINQLLDFRKIDERKFILNPTNTNLNNLVTKTINRFQLTFEQKEKQLTLHITDDVLIANIDQESVIKIISNLINNALKYSNKTIQVDLYATDDNIAHIRVINDGAPIPDNLSKKIFEPFYRTTKVSNIPGSGIGLSLASNLAKLNNAELILDTTASLTTFILSIPISINADEQHTEEKEQEEDSESTTFIEQNTPPTVISDTEEYEELGEDEPKIKENSILIVEDEPEVRSYLSERLEKYFNVYIATNGVEALKVLNEKYINIILSDLMMPEMDGLELCQNVKSNEDLAQIPFVLLTAKTDMDSKMKSLEIGADAYIEKPTAFNYLYKHINMLLKNREKEKKAFLNKPFFPVQKMKVSKNDEKFLNKIIEIINHDLANPELNVKYLADNLYMSRSGLHRKVKQITSLSPIEFIKLIRLKKAAELIQEGEYQIAEVCFMVGINSPSYFGKMFFQQFGMTPKEFAKSNKVGKG

SEQ ID NO: 66 - protein, 1326 aa, Artificial Sequence
  HTCS-17150-V5
MFRLILSLISVLIIVCKSFASNEFVTRKYTTLDGLSQNDVQCIYQDSKGFIWLATNDGLNRFDGYEFKVYGYQSNGLNSNLIVCIDEDSHGNLWIGTADRGVFLFNSVKNEFVSLNLGHSGIDKNFTCDKILVDSKDRVWFHSSDESIYLVNYDFQNGKINTVLRSTLKLPYISDIIEIDNTIMLSSEDGLYECNVDGDELLLNKLLGCPIASAIVISSSQILYSNLENHQLCLYDKHTCKVSTLLENCDIRKMVYKNKRLFYATTSTVNVLTFDVLHAIESKPQVIATYSYSYPQTVVLDKNDILWIGFFKSGFMSIRENNKPIDLFRGIGNDHISSVYTFAKSDIYLGTEGSGLYHFNSITGNARLIPFTANRIVYSTAYSNYTDCMYVSLMYDGIYSFTSDNDYKKISGLRNVRAMLADGKYLWIGTYNKGLFRYDLSTGVMKEIKTSDNKELKIVRNIIKDHKGNIWVASSFGLKVLESADLYIDNPVLNSVKGLDELDYIVPVCEDLNHNIWYGTLGRGLRKIVDLDENHNACVENFSSADGLSSNTIKSIVNGTDGTLWISTNKGINSLNINTQRIRSYDIFDGLQDYEFMELSAGVMTDGTMIFGGVNGINVFRPNDFDVIDFNGSPTLVDFKIFNHSVEADSTYSAYFDKSVSFTEHIELPYNLNTFSFQFSSLDYRSPYKVGYEYMLEGVDDSWISTSAFHREAFYTKLPSGEYMFRLRVRNSDGVYSLNELSIPVIINPPFWRTWYAYTLYILLFLIGVIIFIYLYDRTQKKRYAQKQILADNQREKDIYNAKIEFFTDIAHEIRTPLILINGPLEAILEENEIDPPAIRKNMRIMEQNVKRLLDLINQLLDFRKIDERKFILNPTNTNLNNLVTKTINRFQLTFEQKEKQLTLHITDDVLIANIDQESVIKIISNLINNALKYSNKTIQVDLYATDDNIAHIRVINDGAPIPDNLSKKIFEPFYRTTKVSNIPGSGIGLSLASNLAKLNNAELILDTTASLTTFILSIPISINADEQHTEEKEQEEDSESTTFIEQNTPPTVISDTEEYEELGEDEPKIKENSILIVEDEPEVRSYLSERLEKYFNVYIATNGVEALKVLNEKYINIILSDLMMPEMDGLELCQNVKSNEDLAQIPFVLLTAKTDMDSKMKSLEIGADAYIEKPTAFNYLYKHINMLLKNREKEKKAFLNKPFFPVQKMKVSKNDEKFLNKIIEIINHDLANPELNVKYLADNLYMSRSGLHRKVKQITSLSPIEFIKLIRLKKAAELIQEGEYQIAEVCFMVGINSPSYFGKMFFQQFGMTPKEFAKSNKVGKG

SEQ ID NO: 67 - protein, 1326 aa, Artificial Sequence
  HTCS-17150-V6
MFRLILSLISVLIIVCKSFASNEFVTRKYTTLDGLSQNDVQCIYQDSKGFIWLATNDGLNRFDGYEFKVYGYQSNGLNSNLIVCIDEDSHGNLWIGTADRGVFLFNSVKNEFVSLNLGHSGIDKNFTCDKILVDSKDRVWFHSSDESIYLVNYDFQNGKINTVLRSTLKLPYISDIIEIDNTIMLSSEDGLYECNVDGDELLLNKLLGCPIASAIVISSSQILYSNLENHQLCLYDKHTCKVSTLLENCDIRKMVYKNKRLFYATTSTVNVLTFDVLHAIESKPQVIATYSYSYPQTVVLDKNDILWIGFFKSGFMSIRENNKPIDLFRGIGNDHISSVYTFAKSDIYLGTEGSGLYHFNSITGNARLIPFTANRIVYSTAYSNYTDCMYVSLMYDGIYSFTSDNDYKKISGLRNVRAMLADGKYLWIGTYNKGLFRYDLSTGVMKEIKTSDNKELKIVRNIIKDHKGNIWVASSFGLKVLESADLYIDNPVLNSVKGLDELDYIVPVCEDLNHNIWYGTLGRGLRKIVDLDENHNACVENFSSADGLSSNTIKSIVNGTDGTLWISTNKGINSLNINTQRIRSYDIFDGLQDYEFMELSAGVMTDGTMIFGGVNGINVFRPNDFDVIDFNGSPTLVDFKIFNHSVEADSTYSAYFDKSVSFTEHIELPYNLNTFSFQFSSLDYRSPYKVGYEYMLEGVDDSWISTSAFHREAFYTKLPSGEYMFRLRVRNSDGVYSLNELSIPVIINPPFWQTWYAYTLYFLLFLIGVIIFIYKYDRTQKKRYAQKQILADNQREKDIYNAKIEFFTDIAHEIRTPLILINGPLEAILEENEIDPPAIRKNMRIMEQNVKRLLDLINQLLDFRKIDERKFILNPTNTNLNNLVTKTINRFQLTFEQKEKQLTLHITDDVLIANIDQESVIKIISNLINNALKYSNKTIQVDLYATDDNIAHIRVINDGAPIPDNLSKKIFEPFYRTTKVSNIPGSGIGLSLASNLAKLNNAELILDTTASLTTFILSIPISINADEQHTEEKEQEEDSESTTFIEQNTPPTVISDTEEYEELGEDEPKIKENSILIVEDEPEVRSYLSERLEKYFNVYIATNGVEALKVLNEKYINIILSDLMMPEMDGLELCQNVKSNEDLAQIPFVLLTAKTDMDSKMKSLEIGADAYIEKPTAFNYLYKHINMLLKNREKEKKAFLNKPFFPVQKMKVSKNDEKFLNKIIEIINHDLANPELNVKYLADNLYMSRSGLHRKVKQITSLSPIEFIKLIRLKKAAELIQEGEYQIAEVCFMVGINSPSYFGKMFFQQFGMTPKEFAKSNKVGKG

SEQ ID NO: 68 - protein, 1326 aa, Artificial Sequence; identical to SEQ ID NO: 64
  HTCS-17150-V7

SEQ ID NO: 69 - protein, 606 aa, Artificial Sequence
  HTCS-17150-V8
GEYMFRLRVRNSDGVYSLNELSIPVIINPPFWRSWYAYTLYILLFLIGVIIFKYAYDRTQKKRYAQKQILADNQREKDIYNAKIEFFTDIAHEIRTPLILINGPLEAILEENEIDPPAIRKNMRIMEQNVKRLLDLINQLLDFRKIDERKFILNPTNTNLNNLVTKTINRFQLTFEQKEKQLTLHITDDVLIANIDQESVIKIISNLINNALKYSNKTIQVDLYATDDNIAHIRVINDGAPIPDNLSKKIFEPFYRTTKVSNIPGSGIGLSLASNLAKLNNAELILDTTASLTTFILSIPISINADEQHTEEKEQEEDSESTTFIEQNTPPTVISDTEEYEELGEDEPKIKENSILIVEDEPEVRSYLSERLEKYFNVYIATNGVEALKVLNEKYINIILSDLMMPEMDGLELCQNVKSNEDLAQIPFVLLTAKTDMDSKMKSLEIGADAYIEKPTAFNYLYKHINMLLKNREKEKKAFLNKPFFPVQKMKVSKNDEKFLNKIIEIINHDLANPELNVKYLADNLYMSRSGLHRKVKQITSLSPIEFIKLIRLKKAAELIQEGEYQIAEVCFMVGINSPSYFGKMFFQQFGMTPKEFAKSNKVGKG

SEQ ID NO: 70 - protein, 1326 aa, Artificial Sequence; identical to SEQ ID NO: 65
  HTCS-17150-V9

SEQ ID NO: 71 - protein, 1326 aa, Artificial Sequence
  HTCS-17150-V10
MFRLILSLISVLIIVCKSFASNEFVTRKYTTLDGLSQNDVQCIYQDSKGFIWLATNDGLNRFDGYEFKVYGYQSNGLNSNLIVCIDEDSHGNLWIGTADRGVFLFNSVKNEFVSLNLGHSGIDKNFTCDKILVDSKDRVWFHSSDESIYLVNYDFQNGKINTVLRSTLKLPYISDIIEIDNTIMLSSEDGLYECNVDGDELLLNKLLGCPIASAIVISSSQILYSNLENHQLCLYDKHTCKVSTLLENCDIRKMVYKNKRLFYATTSTVNVLTFDVLHAIESKPQVIATYSYSYPQTVVLDKNDILWIGFFKSGFMSIRENNKPIDLFRGIGNDHISSVYTFAKSDIYLGTEGSGLYHFNSITGNARLIPFTANRIVYSTAYSNYTDCMYVSLMYDGIYSFTSDNDYKKISGLRNVRAMLADGKYLWIGTYNKGLFRYDLSTGVMKEIKTSDNKELKIVRNIIKDHKGNIWVASSFGLKVLESADLYIDNPVLNSVKGLDELDYIVPVCEDLNHNIWYGTLGRGLRKIVDLDENHNACVENFSSADGLSSNTIKSIVNGTDGTLWISTNKGINSLNINTQRIRSYDIFDGLQDYEFMELSAGVMTDGTMIFGGVNGINVFRPNDFDVIDFNGSPTLVDFKIFNHSVEADSTYSAYFDKSVSFTEHIELPYNLNTFSFQFSSLDYRSPYKVGYEYMLEGVDDSWISTSAFHREAFYTKLPSGEYMFRLRVRNSDGVYSLNELSIPVIINPPFWVTWYAYTLYFLLFLIGVIIFIYKYDRTQKKRYAQKQILADNQREKDIYNAKIEFFTDIAHEIRTPLILINGPLEAILEENEIDPPAIRKNMRIMEQNVKRLLDLINQLLDFRKIDERKFILNPTNTNLNNLVTKTINRFQLTFEQKEKQLTLHITDDVLIANIDQESVIKIISNLINNALKYSNKTIQVDLYATDDNIAHIRVINDGAPIPDNLSKKIFEPFYRTTKVSNIPGSGIGLSLASNLAKLNNAELILDTTASLTTFILSIPISINADEQHTEEKEQEEDSESTTFIEQNTPPTVISDTEEYEELGEDEPKIKENSILIVEDEPEVRSYLSERLEKYFNVYIATNGVEALKVLNEKYINIILSDLMMPEMDGLELCQNVKSNEDLAQIPFVLLTAKTDMDSKMKSLEIGADAYIEKPTAFNYLYKHINMLLKNREKEKKAFLNKPFFPVQKMKVSKNDEKFLNKIIEIINHDLANPELNVKYLADNLYMSRSGLHRKVKQITSLSPIEFIKLIRLKKAAELIQEGEYQIAEVCFMVGINSPSYFGKMFFQQFGMTPKEFAKSNKVGKG

SEQ ID NO: 72 - DNA, 10139 bp, Artificial Sequence
  pZR2837 - Ppor10-argS biocontainment plasmid
accaccacttacgcgtacatttaaatctgtatagtgcgcatcttgtgaaagggcgtcgtcccagctgtcgtcccataatggtttggcgcctgctaccagttttccgtcatggccgattggttcaggataagcactgccataaggattgatgcctagattgcctgtaacattgcttgatgcccatacagcagcttcttcggcagagtaaccgttgtccatacgatagttacgcatggcttcccaatataattcataatattggtttgtattcaactggtcgtagtctgcccgtgcacggcttgaaaaaccatatttggcagataattcaacggtgggtgcgctatctttatttccttgtttggtggtgatcataattacgccgtttgctgcacgtgagccatataatgcagcggaagctgcatctttcaatacagtgattgacgcaatatctgaagatgctatggaggaaagagcaccatcgtaaggaacaccatcaaccacatagaggggattggttgaagcgtttacagaaccaactccacgaatcaggatcgtggcgtctgatccaggctgaccgctggaggaaaaagactgtaagccagctacagttccttgcagtgcttttgatacactactgacctgtgctttttcaatagtaccggcggcaatatagcttgcagaccctgtaaatgtggattttttggcagtaccgtaaggaacggttatcactacctcatctaccatttgggttgtttccttcaattctacgttaatcactttgcgtctgtttaccggtatggttactgtttcgtaacctacaaaagagaagatcaggctttcattgccgttaacctgaatctgatagctgccatcgatggaagtgatggtaccgcgagtttgtccttttacagctactgtgacaccaggcatttcttcgcctcctgcggtgactttaccagttactgtaatttcctgtgcatatgtaatcatgcagaatagcaagctacataataatgaagaaaatctgctcatataaacttggcttttattgggggtttgtacattgccatttttcaggcattatatattgaactctctttctaaaattgtgatgctaccttttttatcattatcatatttcctaatagtggttttatggccatccaaacctcattagggactctttttgcttgtgtattttataattgtgatattcaataacaatcgcaaatatatgtattttgatttaaataggataatatattttaatatttttttatggtgaacctgttgaaagtcaaaactatacggaattttattaacgtagttaaaataggaattgtcttatttaaatattgggcggatagatcaaatctatttgtttatcgcattcctgtgtattgatttgtttaatttgatttcaacagtaaatctacttggtagtgcgaagaaaacgcgcaaaaagccgcctaatggcggctttttgcgcgtttttttgacttatgaggggtaaaaatgtcgaaaaagagggggtataatatcccctctttcttttttgaaaatcccctctattgttatgatggatacttcatactttagcatcgtcgaaaagataacctgagctgtcaccggatgtgctttccggtctgatgagtccgtgaggacgaaacagcctctacaaataattttgtttaacccatggcgataaaatataataaaatgaatatagaagaaaaactcaccacgtccattatcagcgctatcaaaacgttgtacggacaggatgtacccggaaaaatggtacaactgcaaaagactaagaaagagtttgaaggacatcttactttggttgttttcccttttctgaaaatgtctaagaaggggcctgaacagaccgcacaggaaataggcggatacctgaaagagcatgctcccgaattggtttcagcctacaatgcagtgaagggctttcttaatttgacaattgcttcggattgttggattgaacttttgaattctattcaggctgctcccgaatacggtattgaaaaggctacggaaaactctccgttggtgatgattgagtattcttctcccaatacaaacaagccgcttcatctggggcacgtccgtaataacctgttgggaaatgccttggcaaatgtcatggcggcaaatggcaataaggtggtcaagaccaatattgtgaatgaccgtggtatccatatctgtaagtccatgctggcctggttgaaatatggtaacggtgaaacacctgaatcatcgggtaagaagggggaccatttgattggtgactattatgtagcttttgacaagcattacaaggctgaggtaaaggaactgacagctcagtaccaggctgaaggcttgaatgaagaagaagctaaggctaaggcagaggcaaactctcctctgatgctggaagctcgcgagatgctccgtaagtgggaggcgaatgaccctgagatccgtgccttgtggaagaagatgaatgactgggtatatgccggattcgatgaaacgtataagatgatgggagttagtttcgataaaatttattatgaatcgaatacctatctggaaggtaaggagaaagtgatggaaggactggaaaaaggtttcttctaccggaaagaggataactctgtatgggctgatttgactgccgaaggactggaccataagttgcttcttcgcggtgacggtacttctgtttatatgacccaggatatcggtactgccaaattacgttttcaggattaccccatcaacaagatgatttatgtagtgggtaatgaacaaaactatcatttccaggtactttctatcttgctcgacaaattgggttttgaatggggcaaaggattggttcatttctcatacggtatggtagagctgcccgagggcaaaatgaaaagtcgtgaaggtacagtagtggatgcggatgatttgatggaagcaatgattgaaactgctaaggaaacttctgctgaattaggtaaattggacggtctgacccaagaagaagccgacaatattgcccgtattgttggtttgggtgctttgaaatattttatcctgaaggtggacgcacgtaagaatatgactttcaacccgaaagaatcgatagatttcaatggcaatacaggacctttcattcagtatacgtatgcccgtatccagtctgtattacgcaaaaaacggcgcgcctgataggtgggctgcccttcctggttggcttggtttcatcagccatccgcttgccctcatctgttacgccggcggtagccggccagcctcgcagagcaggattcccgttgagcaccgccaggtgcgaataagggacagtgaagaaggaacacccgctcgcgggtgggcctacttcacctatcctgcccggctgacgccgttggatacaccaaggaaagtctacacgaaccctttggcaaaatcctgtatatcgtgcgaaaaaggatggatataccgaaaaaatcgctataatgaccccgaagcagggttatgcagcggaaaagttatatacattcatgtccatttatgtaaaaaatcctgctgaccttgtttatgtcttgtcagtcaccatttgcaaaaccatatttgaccctcaaagaggctgaatttgataagcaacttgctacatactcataataaggagctaaatagaacacgaatgggaaatactcaaatgccaaactaaagaagatattggccaaaataaacgctataccgagagagaaacttgatttttcaacttcctaaaacagtgttgttcaaacatttctacttatttgtacttaccagttgaacctacgtttccctaataaaatgtctatggtaaaaagttaaaaaatcctcctacttttgttagatatatttttttgtgtaattttgtaatcgttatgcggcagtaataatatacatattaatacgagttaggaatcctgtagttctcatatgctacgaggaggtattaaaaggtgcgtttcgacaatgcatctattgtagtatattattgcttaatccaaatgaatattataaatttaggaattcttgctcacattgatgcaggaaaaacttccgtaaccgagaatctgctgtttgccagtggagcaacggaaaagtgcggctgtgtggataatggtgacaccataacggactctatggatatagagaaacgtagaggaattactgttcgggcttctacgacatctattatctggaatggtgtgaaatgcaatatcattgacactccgggacacatggattttattgcggaagtggagcggacattcaaaatgcttgatggagcagtcctcatcttatccgcaaaggaaggcatacaagcgcagacaaagttgctgttcaatactttacagaagctgcaaatcccgacaattatatttatcaataagattgaccgagccggtgtgaatttggagcgtttgtatctggatataaaagcaaatctgtctcaagatgtcctgtttatgcaaaatgttgtcgatggatcggtttatccggtttgctcccaaacatatataaaggaagaatacaaagaatttgtatgcaaccatgacgacaatatattagaacgatatttggcggatagcgaaatttcaccggctgattattggaatacgataatcgctcttgtggcaaaagccaaagtctatccggtgctacatggatcagcaatgttcaatatcggtatcaatgagttgttggacgccatcacttcttttatacttcctccggcatcggtttcaaacagactttcatcttatctttataagatagagcatgaccccaaaggacataaaagaagttttctaaaaataattgacggaagtctgagacttcgagatgttgtaagaatcaacgattcggaaaaattcatcaagattaaaaatctaaaaactatcaatcagggcagagagataaatgttgatgaagtgggcgccaatgatatcgcgattgtagaggatatggatgattttcgaatcggaaattatttaggtgctgaaccttgtttgattcaaggattatcgcatcagcatcccgctctcaaatcctccgtccggccagacaggcccgaagagagaagcaaggtgatatccgctctgaatacattgtggattgaagatccgtctttgtccttttccataaactcatatagtgatgaattggaaatctcgttatatggtttaacccaaaaggaaatcatacagacattgctggaagaacgattttccgtaaaggtccattttgatgagatcaagactatatacaaagaacgacctgtaaaaaaggtcaataagattattcagatcgaagtgccgcccaacccttattgggccacaatagggctgactcttgaacccttaccgttagggacagggttgcaaatcgaaagtgacatctcctatggttatctgaaccattcttttcaaaatgccgtttttgaagggattcgtatgtcttgccaatccgggttacatggatgggaagtgactgatctgaaagtaacttttactcaagccgagtattatagcccggtaagtacaccagctgatttcagacagctgaccccttatgtctttaggctggccttgcaacagtcaggtgtggacattctcgaaccgatgctctattttgagttgcagataccccaagcggcaagttccaaagctattacagatttgcaaaaaatgatgtctgagattgaagatatcagttgcaataatgagtggtgtcatattaaagggaaagttccattaaatacaagtaaagactatgcatcagaagtaagttcatacactaagggcttaggcatttttatggttaagccatgcgggtatcaaataacaaaaggcggttattctgataatatccgcatgaacgaaaaagataaacttttattcatgttccaaaaatcaatgtcatcaaaataaaagaaaacgcgcaaaaagccgcctaatggcggctttttgcgcgtttttttgtgttacaaccaattaaccaattctgattagaaaaactcatcgagcatcaaatgaaactgcaatttattcatatcaggattatcaataccatatttttgaaaaagccgtttctgtaatgaaggagaaaactcaccgaggcagttccataggatggcaagatcctggtatcggtctgcgattccgactcgtccaacatcaatacaacctattaatttcccctcgtcaaaaataaggttatcaagtgagaaatcaccatgagtgacgactgaatccggtgagaatggcaaaagcttatgcatttctttccagacttgttcaacaggccagccattacgctcgtcatcaaaatcactcgcatcaaccaaaccgttattcattcgtgattgcgcctgagcgaggcgaaatacgcgatcgctgttaaaaggacaattacaaacaggaatcgaatgcaaccggcgcaggaacactgccagcgcatcaacaatattttcacctgaatcaggatattcttctaatacctggaatgctgttttcccggggatcgcagtggtgagtaaccatgcatcatcaggagtacggataaaatgcttgatggtcggaagaggcataaattccgtcagccagtttagtctgaccatctcatctgtaacatcattggcaacgctacctttgccatgtttcagaaacaactctggcgcatcgggcttcccatacaatcgatagattgtcgcacctgattgcccgacattatcgcgagcccatttatacccatataaatcagcatccatgttggaatttaatcgcggcctggagcaagacgtttcccgttgaatatggctcataacaccccttgtattactgtttatgtaagcagacagttttattgttcatgatgatatatttttatcttgtgcaatgtaacatcagagattttgagacacaacgtggctttgttgaataaatcgaacttttgctgagttgaaggatcagagcctacgttccgaatacggtcaaaaaaaaggccatccgtcaggatggccttcgcattaatatgccgcttcgaattcttttaggaagcgtgtatcgttttcagagaacatacggaggtctttcacctgatatttcaggtttgtgatacgctcgatacccataccgagtccataaccgctgtatattttgctgtctataccatttgattcaagtacgttcgggtctaccataccgcaaccgaggatttctacccagccggtgtgtttacagaacggacatcctttaccgccgcagatattacagctgatatccatttccgcacttggttcagcaaacgggaagtaagacggacgcagacggatctttgtatcagcaccgaacatttctttggcaaagagcagcaatacctgcttcaagtcggtgaatgatacgtttttatctacatacagcgcttctacctgatggaagaaacagtgtgcgcgatagctgatagcttcgttacgatatacacgtcccggacagatgatgcggataggaggctgtgaagtttccatcacacgagtctgtacagaagaagtatgtgtacgcaatactacgtccgggtgagcttcgataaagaaagtgtcctgcatatcgcgtgccggatgatcttcggcaaagttcagtgccgagaacacgtgccagtcatcttcaatttccggaccttcggcaatgctgaatcccagacgggcaaagatatcaatgatttcgttctttacaatggtgagcgggtggcgtgtaccgagttctacaggataagccgaacgcgtcaaatccagtccgtcacaatcgttgtcctgactttcaaacatttctttcagcgcgttgattttgtcctgcgcttttgttttcagttcattcagtctcatgccgacttcttttttctgttcggcagctacattacggaaatctgccattaagtcgttaatggctcccttcttacttaggtatttgatgcggagagcttcgagttcttcggcattggaggcgtgtaaggcttccacctctttcagaagttgttcaatcttagctatcattttttaatatttttagcggccccgttaaacaaaattatttgtagaggctgtttcgtcctcacggactcatcagaccggaaagcacatccggtgacagctcaggctactttgtttctttcgacactgcaaatataagaacattatttgaaagttcaagtgaaactttaaattttaacaatagattaaccattgcaaacaaaacaaaaaaaaggtagcccaattgtaaaacgaaaggcccagtctttcgactgagcctttcgttttatcctacagtcgctcggcgatcgaaggcttcggaaaaaaaaggccatccgtcaggatggccttcgcattaatatgccgcttcgaattcttttaggaagcgtgtatcgttttcagagaacatacggaggtctttcacctgatatttcaggtttgtgatacgctcgatacccataccgagtccataaccgctgtatattttgctgtctataccatttgattcaagtacgttcgggtctaccataccgcaaccgaggatttctacccagccggtgtgtttacagaacggacatcctttaccgccgcagatattacagctgatatccatttccgcacttggttcagcaaacgggaagtaagacggacgcagacggatctttgtatcagcaccgaacatttctttggcaaagagcagcaatacctgcttcaagtcggtgaatgatacgtttttatctacatacagcgcttctacctgatggaagaaacagtgtgcgcgatagctgatagcttcgttacgatatacacgtcccggacagatgatgcggataggaggctgtgaagtttccatcacacgagtctgtacagaagaagtatgtgtacgcaatactacgtccgggtgagcttcgataaagaaagtgtcctgcatatcgcgtgccggatgatcttcggcaaagttcagtgccgagaacacgtgccagtcatcttcaatttccggaccttcggcaatgctgaatcccagacgggcaaagatatcaatgatttcgttctttacaatggtgagcgggtggcgtgtaccgagttctacaggataagccgaacgcgtcaaatccagtccgtcacaatcgttgtcctgactttcaaacatttctttcagcgcgttgattttgtcctgcgcttttgttttcagttcattcagtctcatgccgacttcttttttctgttcggcagctacattacggaaatctgccattaagtcgttaatggctcccttcttacttaggtatttgatgcggagagcttcgagttcttcggcattggaggcgtgtaaggcttccacctctttcagaagttgttcaatcttagctatcattttttaatatttttagcggccccgttaaacaaaattatttgtagaggctgtttcgtcctcacggactcatcagaccggaaagcacatccggtgacagctcaggctactttgtttctttcgacactgcaaatataagaacattatttgaaagttcaagtgaaactttaaattttaacaatagattaaccattgcaaacaaaacaaaaaaaaggtagcccaattgtaaaacgaaaggcccagtctttcgactgagcctttcgttttatcctaggatcagctgtacgtactcgcagttcaacctgttgatagtacgtactaagctctcatgtttcacgtactaagctctcatgtttaacgtactaagctctcatgtttaacgaactaaaccctcatggctaacgtactaagctctcatggctaacgtactaagctctcatgtttcacgtactaagctctcatgtttgaacaataaaattaatataaatcagcaacttaaatagcctctaaggttttaagttttataagaaaaaaaagaatatataaggcttttaaagcttttaaggtttaacggttgtggacaacaagccagggatgtaacgcactgagaagcccttagagcctctcaaagcaattttgagtgacacaggaacacttaacggctgacatggggcggccgcacga

SEQ ID NO: 73 - DNA, 115 bp, Artificial Sequence; identical to SEQ ID NO: 44
  Ppor10s6v7

SEQ ID NO: 74 - DNA, 32 bp, Artificial Sequence
  Ribosome binding site
cctggcatcccatggcgataaaatataataaa

SEQ ID NO: 75 - DNA, 32 bp, Artificial Sequence
  Ribosome binding site
cctggcatcccaagagaataaaatattacaaa

SEQ ID NO: 76 - DNA, 32 bp, Artificial Sequence
  Ribosome binding site
cctggcatctagggcgaaataaatataaaaaa

SEQ ID NO: 77 - DNA, 32 bp, Artificial Sequence
  Ribosome binding site
cctggcatcaattctcgaaaaaatataataaa

SEQ ID NO: 78 - protein, 4 aa, Artificial Sequence
  Linker
NPPF

SEQ ID NO: 79 - protein, 4 aa, Artificial Sequence
  Linker
KAPW

SEQ ID NO: 80 - protein, 4 aa, Artificial Sequence
  Linker
APPF

SEQ ID NO: 81 - protein, 4 aa, Artificial Sequence
  Linker
LPPW

SEQ ID NO: 82 - protein, 4 aa, Artificial Sequence
  Linker
KPPF

SEQ ID NO: 83 - protein, 4 aa, Artificial Sequence
  Linker
  misc_feature (1)..(1): X can be any amino acid
  misc_feature (4)..(4): X can be any amino acid
XPPX

SEQ ID NO: 84 - DNA, 32 bp, Artificial Sequence
  Ribosome binding site
cctggcatcctggaagcattaaattttaaaaa

1. A genetically modified bacterium comprising:
(a) a first activator that is activated by a control molecule;
(b) a first promoter that is activated by the first activator; and
(c) a first essential gene that is operably linked to the first promoter, and optionally:
(d) a second activator that is activated by the control molecule;
(e) a second promoter that is activated by the second activator; and
(f) a second essential gene that is operably linked to the second promoter.

2. The bacterium of claim 1, wherein the first promoter is not activated by the second activator and the second promoter is not activated by the first activator.

3. The bacterium of claim 1, further comprising:
(g) a third activator that is activated by the control molecule;
(h) a third promoter that is activated by the third activator; and
(i) a third essential gene that is operably linked to the third promoter.

4. The bacterium of claim 3, wherein the third promoter is not activated by the first or second activator and the third promoter is not activated by the first or second activator.

5. The bacterium of claim 1, wherein the expression of the first and/or second essential gene is dependent upon the presence of the control molecule.

6-8. (canceled)

9. The bacterium of claim 1, wherein the control molecule is selected from a marine polysaccharide and an antibiotic or a derivative thereof.

10. The bacterium of claim 9, wherein the marine polysaccharide is selected from a porphyran and agarose.

11. (canceled)

12. The bacterium of claim 1, wherein the first and/or second activator is a two-component system (TCS) protein comprising a sensor domain and a regulatory domain.

13. The bacterium of claim 1, wherein the first and/or second activator is a hybrid two-component system (HTCS) protein comprising a sensor domain and a regulatory domain.

14. (canceled)

15. The bacterium of claim 13, wherein the HTCS protein is a chimeric HTCS protein, wherein the sensor domain is a sensor domain from a first naturally-occurring HTCS protein, or a functional fragment or variant thereof, and the regulatory domain is a regulatory domain from a second naturally-occurring HTCS protein, or a functional fragment or variant thereof.

16-18. (canceled)

19. The bacterium of claim 13, wherein the HTCS protein comprises an amino acid sequence having at least 80% identity to any one of SEQ ID NOs: 19, 23, 25, 38, 39, 42, 43, 51, 52, 53, 54, 59, or 64-71, or a functional fragment or variant thereof.

20. The bacterium of claim 1, wherein the bacterium comprises one or more transgenes encoding the first and/or second activator.

21. The bacterium of claim 1, wherein the first and/or second promoter comprises a nucleotide sequence having at least 80% identity to any one of SEQ ID NOs: 1, 2, 7, 8, 9, 10, 11, 12, 13, 45, 46, 62, 63, or 73, or a functional fragment or variant thereof.

22. The bacterium of claim 21, wherein the essential gene is selected from thymidylate synthase (ThyA), arginyl-tRNA synthetase (argS), cysteinyl-tRNA synthetase (cysS), penicillin tolerance protein (lytB) and peptide chain release factor (RF-2).

23. The bacterium of claim 1, wherein the first and/or second activator and/or promoter is heterologous to the bacterium.

24. (canceled)

25. The bacterium of claim 1, wherein culturing of the bacterium results in a bacterium that is capable of growth and/or viability in the absence of the control molecule at a frequency of less than 10⁻⁵, 10⁻⁶, 10⁻⁷, 10⁻⁸, or 10⁻⁹.

26. The bacterium of claim 1, wherein, following culture of the bacterium with the control molecule and subsequent removal of the control molecule from the culture, the half-life of the bacteria in culture is less than a day.

27. The bacterium of claim 1, wherein, following administration of the bacterium and control molecule to a subject, the amount of bacteria in the subject decreases 10 fold within 2 days of removal or discontinuation of the control molecule from the subject.

28. The bacterium of claim 1, wherein the control molecule is a porphyran and the first and second activator are each an HTCS protein, and
(i) the porphyran, when present, activates the first and second HTCS proteins,
(ii) the first and second HTCS proteins, when activated, activate the first and second promoters, respectively, and
(iii) the first and second promoters, when activated, direct expression of the first and second essential genes, respectively, thereby resulting in the growth and/or viability of the bacterium being dependent upon the presence of the porphyran.

29-31. (canceled)

32. The bacterium of claim 1, further comprising one or more transgenes encoding a protein, or a functional fragment or variant thereof, selected from SusC and SusD.

33. The bacterium of claim 1, wherein the bacterium comprises one or more transgenes that increase its ability to utilize a privileged nutrient as carbon source.

34. The bacterium of claim 33, wherein the privileged nutrient is a marine polysaccharide.

35. The bacterium of claim 34, wherein the marine polysaccharide is porphyran.

36. The bacterium of claim 1, further comprising one or more therapeutic transgenes.

37-39. (canceled)

40. The bacterium of claim 36, wherein the therapeutic transgene is operably linked to a promoter, and the promoter comprises the consensus sequence GTTAA(n)₄₋₇GTTAA(n)₃₄₋₃₈TA(n)₂TTTG.

41. The bacterium of claim 36, wherein the therapeutic transgene is operably linked to a promoter, and the promoter comprises SEQ ID NO: 48, SEQ ID NO: 49, or SEQ ID NO: 50.

42. (canceled)

43. A pharmaceutical composition comprising the bacterium of claim 1 and a pharmaceutically acceptable excipient.

44-46. (canceled)

47. A method for reducing the growth and/or viability of a bacterium in the absence of a control molecule, the method comprising genetically modifying the bacterium to comprise:
(a) a first activator that is activated by the control molecule;
(b) a first promoter that is activated by the first activator; and
(c) a first essential gene that is operably linked to the first promoter.

48. The method of claim 47, further comprising genetically modifying the bacterium to comprise:
(d) a second activator that is activated by the control molecule;
(e) a second promoter that is activated by the second activator; and
(f) a second essential gene that is operably linked to the second promoter.

49. The method of claim 48, further comprising genetically modifying the bacterium to comprise:
(g) a third activator that is activated by the control molecule;
(h) a third promoter that is activated by the third activator; and
(i) a third essential gene that is operably linked to the third promoter.

50. A method of colonizing the gut of a subject, the method comprising administering the bacterium of claim 1 to the subject.

51. A method of treating a disease or disorder in a subject in need thereof, the method comprising administering the bacterium of claim 1 to the subject.

52-57. (canceled)
